(19) United States
(12) Patent Application Publication
(10) Pub. No.: US 2007/0015162 A1
(43) Pub. Date: Jan. 18, 2007

(54) 99 human secreted proteins

(76) Inventors: Craig A. Rosen, Laytonsville, MD (US); Steven M. Ruben, Olney, MD (US)

Correspondence Address: HUMAN GENOME SCIENCES INC;INTELLECTUAL PROPERTY DEPT., 14200 SHADY GROVE ROAD, ROCKVILLE, MD, 20850, US

(21) Appl. No.: 10/670,185

(22) Filed: Sep. 25, 2003

Related U.S. Application Data
(63) Continuation-in-part of application No. PCT/US02/09239, filed on Mar. 26, 2002.
Application No. PCT/US02/09239 is a continuation-in-part of application No. 10/105,299, filed on Mar. 26, 2002.
Application No. PCT/US02/09239 is a continuation-in-part of application No. 09/950,082, filed on Sep. 12, 2001.
Application No. PCT/US02/09239 is a continuation-in-part of application No. PCT/US00/06043, filed on Mar. 9, 2000.
Application No. 09/950,082 is a continuation-in-part of application No. PCT/US00/06012, filed on Mar. 9, 2000.
Application No. 09/950,082 is a continuation-in-part of application No. PCT/US00/06058, filed on Mar. 9, 2000.
Application No. 09/950,082 is a continuation-in-part of application No. PCT/US00/06044, filed on Mar. 9, 2000.
Application No. 09/950,082 is a continuation-in-part of application No. PCT/US00/06059, filed on Mar. 9, 2000.
Application No. 09/950,082 is a continuation-in-part of application No. PCT/US00/06042, filed on Mar. 9, 2000.
Application No. 09/950,082 is a continuation-in-part of application No. PCT/US00/06014, filed on Mar. 9, 2000.
Application No. 09/950,082 is a continuation-in-part of application No. PCT/US00/06013, filed on Mar. 9, 2000.
Application No. 09/950,082 is a continuation-in-part of application No. PCT/US00/06049, filed on Mar. 9, 2000.
Application No. 09/950,082 is a continuation-in-part of application No. PCT/US00/06057, filed on Mar. 9, 2000.
Application No. 09/950,082 is a continuation-in-part of application No. PCT/US00/06824, filed on Mar. 16, 2000.
Application No. 09/950,082 is a continuation-in-part of application No. PCT/US00/06765, filed on Mar. 16, 2000.
Application No. 09/950,082 is a continuation-in-part of application No. PCT/US00/06792, filed on Mar. 16, 2000.
Application No. 09/950,082 is a continuation-in-part of application No. PCT/US00/06830, filed on Mar. 16, 2000.
Application No. 09/950,082 is a continuation-in-part of application No. PCT/US00/06782, filed on Mar. 16, 2000.
Application No. 09/950,082 is a continuation-in-part of application No. PCT/US00/06822, filed on Mar. 16, 2000.
Application No. 09/950,082 is a continuation-in-part of application No. PCT/US00/06791, filed on Mar. 16, 2000.
Application No. 09/950,082 is a continuation-in-part of application No. PCT/US00/06828, filed on Mar. 16, 2000.
Application No. 09/950,082 is a continuation-in-part of application No. PCT/US00/06823, filed on Mar. 16, 2000.
Application No. 09/950,082 is a continuation-in-part of application No. PCT/US00/06781, filed on Mar. 16, 2000.
Application No. 09/950,082 is a continuation-in-part of application No. PCT/US00/07505, filed on Mar. 22, 2000.
Application No. 09/950,082 is a continuation-in-part of application No. PCT/US00/07440, filed on Mar. 22, 2000.
Application No. 09/950,082 is a continuation-in-part of application No. PCT/US00/07506, filed on Mar. 22, 2000.
Application No. 09/950,082 is a continuation-in-part of application No. PCT/US00/07507, filed on Mar. 22, 2000.
Application No. 09/950,082 is a continuation-in-part of application No. PCT/US00/07535, filed on Mar. 22, 2000.
Application No. 09/950,082 is a continuation-in-part of application No. PCT/US00/07525, filed on Mar. 22, 2000.
Application No. 09/950,082 is a continuation-in-part of application No. PCT/US00/07534, filed on Mar. 22, 2000.
Application No. 09/950,082 is a continuation-in-part of application No. PCT/US00/07483, filed on Mar. 22, 2000.
Application No. 09/950,082 is a continuation-in-part of application No. PCT/US00/07526, filed on Mar. 22, 2000.
Application No. 09/950,082 is a continuation-in-part of application No. PCT/US00/07527, filed on Mar. 22, 2000.
Application No. 09/950,082 is a continuation-in-part of application No. PCT/US00/07661, filed on Mar. 23, 2000.
Application No. 09/950,082 is a continuation-in-part of application No. PCT/US00/07579, filed on Mar. 23, 2000.
Application No. 09/950,082 is a continuation-in-part of application No. PCT/US00/07723, filed on Mar. 23, 2000.
Application No. 09/950,082 is a continuation-in-part of application No. PCT/US00/07724, filed on Mar. 23, 2000.
Application No. 09/950,082 is a continuation-in-part of application No. PCT/US00/14929, filed on Jun. 1, 2000.
Application No. 09/950,082 is a continuation-in-part of application No. PCT/US00/07722, filed on Mar. 23, 2000.
Application No. 09/950,082 is a continuation-in-part of application No. PCT/US00/07578, filed on Mar. 23, 2000.
Application No. 09/950,082 is a continuation-in-part of application No. PCT/US00/07726, filed on Mar. 23, 2000.
Application No. 09/950,082 is a continuation-in-part of application No. PCT/US00/07677, filed on Mar. 23, 2000.
Application No. 09/950,082 is a continuation-in-part of application No. PCT/US00/07725, filed on Mar. 23, 2000.
Application No. 09/950,082 is a continuation-in-part of application No. PCT/US00/09070, filed on Apr. 6, 2000.
Application No. 09/950,082 is a continuation-in-part of application No. PCT/US00/08982, filed on Apr. 6, 2000.
Application No. 09/950,082 is a continuation-in-part of application No. PCT/US00/08983, filed on Apr. 6, 2000.
Application No. 09/950,082 is a continuation-in-part of application No. PCT/US00/09067, filed on Apr. 6, 2000.
Application No. 09/950,082 is a continuation-in-part of application No. PCT/US00/09066, filed on Apr. 6, 2000.
Application No. 09/950,082 is a continuation-in-part of application No. PCT/US00/09068, filed on Apr. 6, 2000.
Application No. 09/950,082 is a continuation-in-part of application No. PCT/US00/08981, filed on Apr. 6, 2000.
Application No. 09/950,082 is a continuation-in-part of application No. PCT/US00/08980, filed on Apr. 6, 2000.
Application No. 09/950,082 is a continuation-in-part of application No. PCT/US00/09071, filed on Apr. 6, 2000.
Application No. 09/950,082 is a continuation-in-part of application No. PCT/US00/09069, filed on Apr. 6, 2000.
Application No. 09/950,082 is a continuation-in-part of application No. PCT/US00/15136, filed on Jun. 1, 2000.
Application No. 09/950,082 is a continuation-in-part of application No. PCT/US00/14926, filed on Jun. 1, 2000.
Application No. 09/950,082 is a continuation-in-part of application No. PCT/US00/14963, filed on Jun. 1, 2000.
Application No. 09/950,082 is a continuation-in-part of application No. PCT/US00/15135, filed on Jun. 1, 2000.
Application No. 09/950,082 is a continuation-in-part of application No. PCT/US00/14934, filed on Jun. 1, 2000.
Application No. 09/950,082 is a continuation-in-part of application No. PCT/US00/14933, filed on Jun. 1, 2000.
Application No. 09/950,082 is a continuation-in-part of application No. PCT/US00/15137, filed on Jun. 1, 2000.
Application No. 09/950,082 is a continuation-in-part of application No. PCT/US00/14928, filed on Jun. 1, 2000.
Application No. 09/950,082 is a continuation-in-part of application No. PCT/US00/14973, filed on Jun. 1, 2000.
Application No. 09/950,082 is a continuation-in-part of application No. PCT/US00/14964, filed on Jun. 1, 2000.
Application No. 09/950,082 is a continuation-in-part of application No. PCT/US00/26376, filed on Sep. 26, 2000.
Application No. 09/950,082 is a continuation-in-part of application No. PCT/US00/26371, filed on Sep. 26, 2000.
Application No. 09/950,082 is a continuation-in-part of application No. PCT/US00/26324, filed on Sep. 26, 2000.
Application No. 09/950,082 is a continuation-in-part of application No. PCT/US00/26323, filed on Sep. 26, 2000.
Application No. 09/950,082 is a continuation-in-part of application No. PCT/US00/26337, filed on Sep. 26, 2000.
Application No. 09/950,082 is a continuation-in-part of application No. PCT/US01/13318, filed on Apr. 26, 2001.
Application No. 10/105,299 is a continuation-in-part of application No. 09/950,083, filed on Sep. 12, 2001.
Application No. 10/105,299 is a continuation-in-part of application No. PCT/US00/06043, filed on Mar. 9, 2000.
Application No. 09/950,083 is a continuation-in-part of application No. PCT/US00/06012, filed on Mar. 9, 2000.
Application No. 09/950,083 is a continuation-in-part of application No. PCT/US00/06058, filed on Mar. 9, 2000.
Application No. 09/950,083 is a continuation-in-part of application No. PCT/US00/06044, filed on Mar. 9, 2000.
Application No. 09/950,083 is a continuation-in-part of application No. PCT/US00/06059, filed on Mar. 9, 2000.
Application No. 09/950,083 is a continuation-in-part of application No. PCT/US00/06042, filed on Mar. 9, 2000.
Application No. 09/950,083 is a continuation-in-part of application No. PCT/US00/06014, filed on Mar. 9, 2000.
Application No. 09/950,083 is a continuation-in-part of application No. PCT/US00/06013, filed on Mar. 9, 2000.
Application No. 09/950,083 is a continuation-in-part of application No. PCT/US00/06049, filed on Mar. 9, 2000.
Application No. 09/950,083 is a continuation-in-part of application No. PCT/US00/06057, filed on Mar. 9, 2000.
Application No. 09/950,083 is a continuation-in-part of application No. PCT/US00/06824, filed on Mar. 16, 2000.
Application No. 09/950,083 is a continuation-in-part of application No. PCT/US00/06765, filed on Mar. 16, 2000.
Application No. 09/950,083 is a continuation-in-part of application No. PCT/US00/06792, filed on Mar. 16, 2000.
Application No. 09/950,083 is a continuation-in-part of application No. PCT/US00/06830, filed on Mar. 16, 2000.
Application No. 09/950,083 is a continuation-in-part of application No. PCT/US00/06782, filed on Mar. 16, 2000.
Application No. 09/950,083 is a continuation-in-part of application No. PCT/US00/06822, filed on Mar. 16, 2000.
Application No. 09/950,083 is a continuation-in-part of application No. PCT/US00/06791, filed on Mar. 16, 2000.
Application No. 09/950,083 is a continuation-in-part of application No. PCT/US00/06828, filed on Mar. 16, 2000.
Application No. 09/950,083 is a continuation-in-part of application No. PCT/US00/06823, filed on Mar. 16, 2000.
Application No. 09/950,083 is a continuation-in-part of application No. PCT/US00/06781, filed on Mar. 16, 2000.
Application No. 09/950,083 is a continuation-in-part of application No. PCT/US00/07505, filed on Mar. 22, 2000.
Application No. 09/950,083 is a continuation-in-part of application No. PCT/US00/07440, filed on Mar. 22, 2000.
Application No. 09/950,083 is a continuation-in-part of application No. PCT/US00/07506, filed on Mar. 22, 2000.
Application No. 09/950,083 is a continuation-in-part of application No. PCT/US00/07507, filed on Mar. 22, 2000.
Application No. 09/950,083 is a continuation-in-part of application No. PCT/US00/07535, filed on Mar. 22, 2000.
Application No. 09/950,083 is a continuation-in-part of application No. PCT/US00/07525, filed on Mar. 22, 2000.
Application No. 09/950,083 is a continuation-in-part of application No. PCT/US00/07534, filed on Mar. 22, 2000.
Application No. 09/950,083 is a continuation-in-part of application No. PCT/US00/07483, filed on Mar. 22, 2000.
Application No. 09/950,083 is a continuation-in-part of application No. PCT/US00/07526, filed on Mar. 22, 2000.
Application No. 09/950,083 is a continuation-in-part of application No. PCT/US00/07527, filed on Mar. 22, 2000.
Application No. 09/950,083 is a continuation-in-part of application No. PCT/US00/07661, filed on Mar. 23, 2000.
Application No. 09/950,083 is a continuation-in-part of application No. PCT/US00/07579, filed on Mar. 23, 2000.
Application No. 09/950,083 is a continuation-in-part of application No. PCT/US00/07723, filed on Mar. 23, 2000.
Application No. 09/950,083 is a continuation-in-part of application No. PCT/US00/07724, filed on Mar. 23, 2000.
Application No. 09/950,083 is a continuation-in-part of application No. PCT/US00/14929, filed on Jun. 1, 2000.
Application No. 09/950,083 is a continuation-in-part of application No. PCT/US00/07722, filed on Mar. 23, 2000.
Application No. 09/950,083 is a continuation-in-part of application No. PCT/US00/07578, filed on Mar. 23, 2000.
Application No. 09/950,083 is a continuation-in-part of application No. PCT/US00/07726, filed on Mar. 23, 2000.
Application No. 09/950,083 is a continuation-in-part of application No. PCT/US00/07677, filed on Mar. 23, 2000.
Application No. 09/950,083 is a continuation-in-part of application No. PCT/US00/07725, filed on Mar. 23, 2000.
Application No. 09/950,083 is a continuation-in-part of application No. PCT/US00/09070, filed on Apr. 6, 2000.
Application No. 09/950,083 is a continuation-in-part of application No. PCT/US00/08982, filed on Apr. 6, 2000.
Application No. 09/950,083 is a continuation-in-part of application No. PCT/US00/08983, filed on Apr. 6, 2000.
Application No. 09/950,083 is a continuation-in-part of application No. PCT/US00/09067, filed on Apr. 6, 2000.
Application No. 09/950,083 is a continuation-in-part of application No. PCT/US00/09066, filed on Apr. 6, 2000.
Application No. 09/950,083 is a continuation-in-part of application No. PCT/US00/09068, filed on Apr. 6, 2000.
Application No. 09/950,083 is a continuation-in-part of application No. PCT/US00/08981, filed on Apr. 6, 2000.
Application No. 09/950,083 is a continuation-in-part of application No. PCT/US00/08980, filed on Apr. 6, 2000.
Application No. 09/950,083 is a continuation-in-part of application No. PCT/US00/09071, filed on Apr. 6, 2000.
Application No. 09/950,083 is a continuation-in-part of application No. PCT/US00/09069, filed on Apr. 6, 2000.
Application No. 09/950,083 is a continuation-in-part of application No. PCT/US00/15136, filed on Jun. 1, 2000.
Application No. 09/950,083 is a continuation-in-part of application No. PCT/US00/14926, filed on Jun. 1, 2000.
Application No. 09/950,083 is a continuation-in-part of application No. PCT/US00/14963, filed on Jun. 1, 2000.
Application No. 09/950,083 is a continuation-in-part of application No. PCT/US00/15135, filed on Jun. 1, 2000.
Application No. 09/950,083 is a continuation-in-part of application No. PCT/US00/14934, filed on Jun. 1, 2000.
Application No. 09/950,083 is a continuation-in-part of application No. PCT/US00/14933, filed on Jun. 1, 2000.
Application No. 09/950,083 is a continuation-in-part of application No. PCT/US00/15137, filed on Jun. 1, 2000.
Application No. 09/950,083 is a continuation-in-part of application No. PCT/US00/14928, filed on Jun. 1, 2000.
Application No. 09/950,083 is a continuation-in-part of application No. PCT/US00/14973, filed on Jun. 1, 2000.
Application No. 09/950,083 is a continuation-in-part of application No. PCT/US00/14964, filed on Jun. 1, 2000.
Application No. 09/950,083 is a continuation-in-part of application No. PCT/US00/26376, filed on Sep. 26, 2000.
Application No. 09/950,083 is a continuation-in-part of application No. PCT/US00/26371, filed on Sep. 26, 2000.
Application No. 09/950,083 is a continuation-in-part of application No. PCT/US00/26324, filed on Sep. 26, 2000.
Application No. 09/950,083 is a continuation-in-part of application No. PCT/US00/26323, filed on Sep. 26, 2000.
Application No. 09/950,083 is a continuation-in-part of application No. PCT/US00/26337, filed on Sep. 26, 2000.
Application No. 09/950,083 is a continuation-in-part of application No. PCT/US01/13318, filed on Apr. 26, 2001.
(60) Provisional application No. 60/278,650, filed on Mar. 27, 2001.
(60) Provisional application No. 60/278,650, filed on Mar. 27, 2001.
(60) Provisional application No. 60/167,061, filed on Nov. 23, 1999.
(60) Provisional application No. 60/124,146, filed on Mar. 12, 1999.
(60) Provisional application No. 60/166,989, filed on Nov. 23, 1999.
(60) Provisional application No. 60/124,093, filed on Mar. 12, 1999.
(60) Provisional application No. 60/168,654, filed on Dec. 3, 1999.
(60) Provisional application No. 60/124,145, filed on Mar. 12, 1999.
(60) Provisional application No. 60/168,661, filed on Dec. 3, 1999.
(60) Provisional application No. 60/124,099, filed on Mar. 12, 1999.
(60) Provisional application No. 60/168,622, filed on Dec. 3, 1999.
(60) Provisional application No. 60/124,096, filed on Mar. 12, 1999.
(60) Provisional application No. 60/168,663, filed on Dec. 3, 1999.
(60) Provisional application No. 60/124,143, filed on Mar. 12, 1999.
(60) Provisional application No. 60/168,665, filed on Dec. 3, 1999.
(60) Provisional application No. 60/138,598, filed on Jun. 11, 1999.
(60) Provisional application No. 60/124,095, filed on Mar. 12, 1999.
(60) Provisional application No. 60/168,662, filed on Dec. 3, 1999.
(60) Provisional application No. 60/138,626, filed on Jun. 11, 1999.
(60) Provisional application No. 60/125,360, filed on Mar. 19, 1999.
(60) Provisional application No. 60/168,667, filed on Dec. 3, 1999.
(60) Provisional application No. 60/138,574, filed on Jun. 11, 1999.
(60) Provisional application No. 60/124,144, filed on Mar. 12, 1999.
(60) Provisional application No. 60/168,666, filed on Dec. 3, 1999.
(60) Provisional application No. 60/138,597, filed on Jun. 11, 1999.
(60) Provisional application No. 60/124,142, filed on Mar. 12, 1999.
(60) Provisional application No. 60/168,664, filed on Dec. 3, 1999.
(60) Provisional application No. 60/125,359, filed on Mar. 19, 1999.
(60) Provisional application No. 60/169,906, filed on Dec. 10, 1999.
(60) Provisional application No. 60/126,051, filed on Mar. 23, 1999.
(60) Provisional application No. 60/169,980, filed on Dec. 10, 1999.
(60) Provisional application No. 60/125,362, filed on Mar. 19, 1999.
(60) Provisional application No. 60/169,910, filed on Dec. 10, 1999.
(60) Provisional application No. 60/125,361, filed on Mar. 19, 1999.
(60) Provisional application No. 60/169,936, filed on Dec. 10, 1999.
(60) Provisional application No. 60/125,812, filed on Mar. 23, 1999.
(60) Provisional application No. 60/169,916, filed on Dec. 10, 1999.
(60) Provisional application No. 60/126,054, filed on Mar. 23, 1999.
(60) Provisional application No. 60/169,946, filed on Dec. 10, 1999.
(60) Provisional application No. 60/125,815, filed on Mar. 23, 1999.
(60) Provisional application No. 60/169,616, filed on Dec. 8, 1999.
(60) Provisional application No. 60/125,358, filed on Mar. 19, 1999.
(60) Provisional application No. 60/169,623, filed on Dec. 8, 1999.
(60) Provisional application No. 60/125,364, filed on Mar. 19, 1999.
(60) Provisional application No. 60/169,617, filed on Dec. 8, 1999.
(60) Provisional application No. 60/125,363, filed on Mar. 19, 1999.
(60) Provisional application No. 60/172,410, filed on Dec. 17, 1999.
(60) Provisional application No. 60/126,502, filed on Mar. 26, 1999.
(60) Provisional application No. 60/172,409, filed on Dec. 17, 1999.
(60) Provisional application No. 60/126,503, filed on Mar. 26, 1999.
(60) Provisional application No. 60/172,412, filed on Dec. 17, 1999.
(60) Provisional application No. 60/126,505, filed on Mar. 26, 1999.
(60) Provisional application No. 60/172,408, filed on Dec. 17, 1999.
(60) Provisional application No. 60/126,594, filed on Mar. 26, 1999.
(60) Provisional application No. 60/172,413, filed on Dec. 17, 1999.
(60) Provisional application No. 60/126,511, filed on Mar. 26, 1999.
(60) Provisional application No. 60/171,549, filed on Dec. 22, 1999.
(60) Provisional application No. 60/126,595, filed on Mar. 26, 1999.
(60) Provisional application No. 60/171,504, filed on Dec. 22, 1999.
(60) Provisional application No. 60/126,598, filed on Mar. 26, 1999.
(60) Provisional application No. 60/171,552, filed on Dec. 22, 1999.
(60) Provisional application No. 60/126,596, filed on Mar. 26, 1999.
(60) Provisional application No. 60/171,550, filed on Dec. 22, 1999.
(60) Provisional application No. 60/126,600, filed on Mar. 26, 1999.
(60) Provisional application No. 60/171,551, filed on Dec. 22, 1999.
(60) Provisional application No. 60/126,501, filed on Mar. 26, 1999.
(60) Provisional application No. 60/174,847, filed on Jan. 7, 2000.
(60) Provisional application No. 60/126,504, filed on Mar. 26, 1999.
(60) Provisional application No. 60/174,853, filed on Jan. 7, 2000.
(60) Provisional application No. 60/126,509, filed on Mar. 26, 1999.
(60) Provisional application No. 60/174,852, filed on Jan. 7, 2000.
(60) Provisional application No. 60/126,506, filed on Mar. 26, 1999.
(60) Provisional application No. 60/174,850, filed on Jan. 7, 2000.
(60) Provisional application No. 60/126,510, filed on Mar. 26, 1999.
(60) Provisional application No. 60/174,851, filed on Jan. 7, 2000.
(60) Provisional application No. 60/138,573, filed on Jun. 11, 1999.
(60) Provisional application No. 60/174,871, filed on Jan. 7, 2000.
(60) Provisional application No. 60/126,508, filed on Mar. 26, 1999.
(60) Provisional application No. 60/174,872, filed on Jan. 7, 2000.
(60) Provisional application No. 60/126,507, filed on Mar. 26, 1999.
(60) Provisional application No. 60/174,877, filed on Jan. 7, 2000.
(60) Provisional application No. 60/126,597, filed on Mar. 26, 1999.
(60) Provisional application No. 60/176,064, filed on Jan. 14, 2000.
(60) Provisional application No. 60/154,373, filed on Sep. 17, 1999.
(60) Provisional application No. 60/126,601, filed on Mar. 26, 1999.
(60) Provisional application No. 60/176,063, filed on Jan. 14, 2000.
(60) Provisional application No. 60/126,602, filed on Mar. 26, 1999.
(60) Provisional application No. 60/176,052, filed on Jan. 14, 2000.
(60) Provisional application No. 60/128,695, filed on Apr. 9, 1999.
(60) Provisional application No. 60/176,069, filed on Jan. 14, 2000.
(60) Provisional application No. 60/128,696, filed on Apr. 9, 1999.
(60) Provisional application No. 60/176,068, filed on Jan. 14, 2000.
(60) Provisional application No. 60/128,703, filed on Apr. 9, 1999.
(60) Provisional application No. 60/176,929, filed on Jan. 20, 2000.
(60) Provisional application No. 60/128,697, filed on Apr. 9, 1999.
(60) Provisional application No. 60/176,926, filed on Jan. 20, 2000.
(60) Provisional application No. 60/128,698, filed on Apr. 9, 1999.
(60) Provisional application No. 60/177,050, filed on Jan. 20, 2000.
(60) Provisional application No. 60/128,699, filed on Apr. 9, 1999.
(60) Provisional application No. 60/177,166, filed on Jan. 20, 2000.
(60) Provisional application No. 60/128,701, filed on Apr. 9, 1999.
(60) Provisional application No. 60/176,930, filed on Jan. 20, 2000.
(60) Provisional application No. 60/128,700, filed on Apr. 9, 1999.
(60) Provisional application No. 60/176,931, filed on Jan. 20, 2000.
(60) Provisional application No. 60/128,694, filed on Apr. 9, 1999.
(60) Provisional application No. 60/177,049, filed on Jan. 20, 2000.
(60) Provisional application No. 60/128,702, filed on Apr. 9, 1999.
(60) Provisional application No. 60/138,629, filed on Jun. 11, 1999.
(60) Provisional application No. 60/138,628, filed on Jun. 11, 1999.
(60) Provisional application No. 60/138,631, filed on Jun. 11, 1999.
(60) Provisional application No. 60/138,632, filed on Jun. 11, 1999.
(60) Provisional application No. 60/138,599, filed on Jun. 11, 1999.
(60) Provisional application No. 60/138,572, filed on Jun. 11, 1999.
(60) Provisional application No. 60/138,625, filed on Jun. 11, 1999.
(60) Provisional application No. 60/138,633, filed on Jun. 11, 1999.
(60) Provisional application No. 60/138,630, filed on Jun. 11, 1999.
(60) Provisional application No. 60/138,627, filed on Jun. 11, 1999.
(60) Provisional application No. 60/155,808, filed on Sep. 27, 1999.
(60) Provisional application No. 60/155,804, filed on Sep. 27, 1999.
(60) Provisional application No. 60/155,807, filed on Sep. 27, 1999.
(60) Provisional application No. 60/155,805, filed on Sep. 27, 1999.
(60) Provisional application No. 60/155,806, filed on Sep. 27, 1999.
(60) Provisional application No. 60/212,142, filed on Jun. 16, 2000.
(60) Provisional application No. 60/201,194, filed on May 2, 2000.
(60) Provisional application No. 60/278,650, filed on Mar. 27, 2001.
(60) Provisional application No. 60/167,061, filed on Nov. 23, 1999.
(60) Provisional application No. 60/124,146, filed on Mar. 12, 1999.
(60) Provisional application No. 60/166,989, filed on Nov. 23, 1999.
(60) Provisional application No. 60/124,093, filed on Mar. 12, 1999.
(60) Provisional application No. 60/168,654, filed on Dec. 3, 1999.
(60) Provisional application No. 60/124,145, filed on Mar. 12, 1999.
(60) Provisional application No. 60/168,661, filed on Dec. 3, 1999.
(60) Provisional application No. 60/124,099, filed on Mar. 12, 1999.
(60) Provisional application No. 60/168,622, filed on Dec. 3, 1999.
(60) Provisional application No. 60/124,096, filed on Mar. 12, 1999.
(60) Provisional application No. 60/168,663, filed on Dec. 3, 1999.
(60) Provisional application No. 60/124,143, filed on Mar. 12, 1999.
(60) Provisional application No. 60/168,665, filed on Dec. 3, 1999.
(60) Provisional application No. 60/138,598, filed on Jun. 11, 1999.
(60) Provisional application No. 60/124,095, filed on Mar. 12, 1999.
(60) Provisional application No. 60/168,662, filed on Dec. 3, 1999.
(60) Provisional application No. 60/138,626, filed on Jun. 11, 1999.
(60) Provisional application No. 60/125,360, filed on Mar. 19, 1999.
(60) Provisional application No. 60/168,667, filed on Dec. 3, 1999.
(60) Provisional application No. 60/138,574, filed on Jun. 11, 1999.
(60) Provisional application No. 60/124,444, filed on Mar. 15, 1999.
(60) Provisional application No. 60/168,666, filed on Dec. 3, 1999.
(60) Provisional application No. 60/138,597, filed on Jun. 11, 1999.
(60) Provisional application No. 60/124,142, filed on Mar. 12, 1999.
(60) Provisional application No. 60/168,664, filed on Dec. 3, 1999.
(60) Provisional application No. 60/125,359, filed on Mar. 19, 1999.
(60) Provisional application No. 60/169,906, filed on Dec. 10, 1999.
(60) Provisional application No. 60/126,051, filed on Mar. 23, 1999.
(60) Provisional application No. 60/169,980, filed on Dec. 10, 1999.
(60) Provisional application No. 60/125,362, filed on Mar. 19, 1999.
(60) Provisional application No. 60/169,910, filed on Dec. 10, 1999.
(60) Provisional application No. 60/125,361, filed on Mar. 19, 1999.
(60) Provisional application No. 60/169,936, filed on Dec. 10, 1999.
(60) Provisional application No. 60/125,812, filed on Mar. 23, 1999.
(60) Provisional application No. 60/169,916, filed on Dec. 10, 1999.
(60) Provisional application No. 60/126,054, filed on Mar. 23, 1999.
(60) Provisional application No. 60/169,946, filed on Dec. 10, 1999.
(60) Provisional application No. 60/125,815, filed on Mar. 23, 1999.
(60) Provisional application No. 60/169,616, filed on Dec. 8, 1999.
(60) Provisional application No. 60/125,358, filed on Mar. 19, 1999.
(60) Provisional application No. 60/169,623, filed on Dec. 8, 1999.
(60) Provisional application No. 60/125,364, filed on Mar. 19, 1999.
(60) Provisional application No. 60/169,617, filed on Dec. 8, 1999.
(60) Provisional application No. 60/125,363, filed on Mar. 19, 1999.
(60) Provisional application No. 60/172,410, filed on Dec. 17, 1999.
(60) Provisional application No. 60/126,502, filed on Mar. 26, 1999.
(60) Provisional application No. 60/172,409, filed on Dec. 17, 1999.
(60) Provisional application No. 60/126,503, filed on Mar. 26, 1999.
(60) Provisional application No. 60/172,412, filed on Dec. 17, 1999.
(60) Provisional application No. 60/126,505, filed on Mar. 26, 1999.
(60) Provisional application No. 60/172,408, filed on Dec. 17, 1999.
(60) Provisional application No. 60/126,594, filed on Mar. 26, 1999.
(60) Provisional application No. 60/172,413, filed on Dec. 17, 1999.
(60) Provisional application No. 60/126,511, filed on Mar. 26, 1999.
(60) Provisional application No. 60/171,549, filed on Dec. 22, 1999.
(60) Provisional application No. 60/126,595, filed on Mar. 26, 1999.
(60) Provisional application No. 60/171,504, filed on Dec. 22, 1999.
(60) Provisional application No. 60/126,598, filed on Mar. 26, 1999.
(60) Provisional application No. 60/171,552, filed on Dec. 22, 1999.
(60) Provisional application No. 60/126,596, filed on Mar. 26, 1999.
(60) Provisional application No. 60/171,550, filed on Dec. 22, 1999.
(60) Provisional application No. 60/126,600, filed on Mar. 26, 1999.
(60) Provisional application No. 60/171,551, filed on Dec. 22, 1999.
(60) Provisional application No. 60/126,501, filed on Mar. 26, 1999.
(60) Provisional application No. 60/174,847, filed on Jan. 7, 2000.
(60) Provisional application No. 60/126,504, filed on Mar. 26, 1999.
(60) Provisional application No. 60/174,853, filed on Jan. 7, 2000.
(60) Provisional application No. 60/126,509, filed on Mar. 26, 1999.
(60) Provisional application No. 60/174,852, filed on Jan. 7, 2000.
(60) Provisional application No. 60/126,506, filed on Mar. 26, 1999.
(60) Provisional application No. 60/174,850, filed on Jan. 7, 2000.
(60) Provisional application No. 60/126,510, filed on Mar. 26, 1999.
(60) Provisional application No. 60/174,851, filed on Jan. 7, 2000.
(60) Provisional application No. 60/138,573, filed on Jun. 11, 1999.
(60) Provisional application No. 60/174,871, filed on Jan. 7, 2000.
(60) Provisional application No. 60/126,508, filed on Mar. 26, 1999.
(60) Provisional application No. 60/174,872, filed on Jan. 7, 2000.
(60) Provisional application No. 60/126,507, filed on Mar. 26, 1999.
(60) Provisional application No. 60/174,877, filed on Jan. 7, 2000.
(60) Provisional application No. 60/126,597, filed on Mar. 26, 1999.
(60) Provisional application No. 60/176,064, filed on Jan. 14, 2000.
(60) Provisional application No. 60/154,373, filed on Sep. 17, 1999.
(60) Provisional application No. 60/126,601, filed on Mar. 26, 1999.
(60) Provisional application No. 60/176,063, filed on Jan. 14, 2000.
(60) Provisional application No. 60/126,602, filed on Mar. 26, 1999.
(60) Provisional application No. 60/176,052, filed on Jan. 14, 2000.
(60) Provisional application No. 60/128,695, filed on Apr. 9, 1999.
(60) Provisional application No. 60/176,069, filed on Jan. 14, 2000.
(60) Provisional application No. 60/128,696, filed on Apr. 9, 1999.
(60) Provisional application No. 60/176,068, filed on Jan. 14, 2000.
(60) Provisional application No. 60/128,703, filed on Apr. 9, 1999.
(60) Provisional application No. 60/176,929, filed on Jan. 20, 2000.
(60) Provisional application No. 60/128,697, filed on Apr. 9, 1999.
(60) Provisional application No. 60/176,926, filed on Jan. 20, 2000.
(60) Provisional application No. 60/128,698, filed on Apr. 9, 1999.
(60) Provisional application No. 60/177,050, filed on Jan. 20, 2000.
(60) Provisional application No. 60/128,699, filed on Apr. 9, 1999.
(60) Provisional application No. 60/177,166, filed on Jan. 20, 2000.
(60) Provisional application No. 60/128,701, filed on Apr. 9, 1999.
(60) Provisional application No. 60/176,930, filed on Jan. 20, 2000.
(60) Provisional application No. 60/128,700, filed on Apr. 9, 1999.
(60) Provisional application No. 60/176,931, filed on Jan. 20, 2000.
(60) Provisional application No. 60/128,694, filed on Apr. 9, 1999.
(60) Provisional application No. 60/177,049, filed on Jan. 20, 2000.
(60) Provisional application No. 60/128,702, filed on Apr. 9, 1999.
(60) Provisional application No. 60/138,629, filed on Jun. 11, 1999.
(60) Provisional application No. 60/138,628, filed on Jun. 11, 1999.
(60) Provisional application No. 60/138,631, filed on Jun. 11, 1999.
(60) Provisional application No. 60/138,632, filed on Jun. 11, 1999.
(60) Provisional application No. 60/138,599, filed on Jun. 11, 1999.
(60) Provisional application No. 60/138,572, filed on Jun. 11, 1999.
(60) Provisional application No. 60/138,625, filed on Jun. 11, 1999.
(60) Provisional application No. 60/138,633, filed on Jun. 11, 1999.
(60) Provisional application No. 60/138,630, filed on Jun. 11, 1999.
(60) Provisional application No. 60/138,627, filed on Jun. 11, 1999.
(60) Provisional application No. 60/155,808, filed on Sep. 27, 1999.
(60) Provisional application No. 60/155,804, filed on Sep. 27, 1999.
(60) Provisional application No. 60/155,807, filed on Sep. 27, 1999.
(60) Provisional application No. 60/155,805, filed on Sep. 27, 1999.
(60) Provisional application No. 60/155,806, filed on Sep. 27, 1999.
(60) Provisional application No. 60/212,142, filed on Jun. 16, 2000.
(60) Provisional application No. 60/201,194, filed on May 2, 2000.

(51) Int. Cl. C12Q 1/68; C07H 21/04; C12N 5/06

(52) U.S. Cl. 435/6; 435/69.1; 435/320.1; 435/327; 530/387.2; 536/23.53

(57) ABSTRACT

The present invention relates to human secreted polypeptides, and isolated nucleic acid molecules encoding said polypeptides, useful for diagnosing and treating allergic and asthmatic disorders. Antibodies that bind these polypeptides are also encompassed by the present invention. Also encompassed by the invention are vectors, host cells, and recombinant and synthetic methods for producing said polynucleotides, polypeptides, and/or antibodies. The invention further encompasses screening methods for identifying agonists and antagonists of polynucleotides and polypeptides of the invention. The present invention further encompasses methods and compositions for inhibiting or enhancing the production and function of the polypeptides of the present invention.

### RELATED APPLICATIONS

[0001] This application is a continuation-in-part of PCT/US02/09239, filed Mar. 26, 2002, which in turn claims benefit of the following:

| Application:: | Continuity Type:: | Parent Application:: | Parent Filing Date:: |
|---|---|---|---|
| PCT/US02/09239 | Continuation-in-part of | 10/105,299 | Mar. 26, 2002 |
| 10/105,299 | Non-provisional of | US60/278,650 | Mar. 27, 2001 |
| 10/105,299 | Continuation-in-part of | US09/950,082 | Sep. 12, 2001 |
| US09/950,082 | Non-provisional of | US60/278,650 | Mar. 27, 2001 |
| US09/950,082 | Continuation-in-part of | PCT/US00/06043 | Mar. 09, 2000 |
| US00/06043 | Non-provisional of | US60/167,061 | Nov. 23, 1999 |
| US00/06043 | Non-provisional of | US60/124,146 | Mar. 12, 1999 |
| US09/950,082 | Continuation-in-part of | PCT/US00/06012 | Mar. 09, 2000 |
| US00/06012 | Non-provisional of | US60/166,989 | Nov. 23, 1999 |
| US00/06012 | Non-provisional of | US60/124,093 | Mar. 12, 1999 |
| US09/950,082 | Continuation-in-part of | PCT/US00/06058 | Mar. 09, 2000 |
| US00/06058 | Non-provisional of | US60/168,654 | Dec. 03, 1999 |
| US00/06058 | Non-provisional of | US60/124,145 | Mar. 12, 1999 |
| US09/950,082 | Continuation-in-part of | PCT/US00/06044 | Mar. 09, 2000 |
| US00/06044 | Non-provisional of | US60/168,661 | Dec. 03, 1999 |
| US00/06044 | Non-provisional of | US60/124,099 | Mar. 12, 1999 |
| US09/950,082 | Continuation-in-part of | PCT/US00/06059 | Mar. 09, 2000 |
| US00/06059 | Non-provisional of | US60/168,622 | Dec. 03, 1999 |
| US00/06059 | Non-provisional of | US60/124,096 | Mar. 12, 1999 |
| US09/950,082 | Continuation-in-part of | PCT/US00/06042 | Mar. 09, 2000 |
| US00/06042 | Non-provisional of | US60/168,663 | Dec. 03, 1999 |
| US00/06042 | Non-provisional of | US60/124,143 | Mar. 12, 1999 |
| US09/950,082 | Continuation-in-part of | PCT/US00/06014 | Mar. 09, 2000 |
| US00/06014 | Non-provisional of | US60/168,665 | Dec. 03, 1999 |
| US00/06014 | Non-provisional of | US60/138,598 | Jun. 11, 1999 |
| US00/06014 | Non-provisional of | US60/124,095 | Mar. 12, 1999 |
| US09/950,082 | Continuation-in-part of | PCT/US00/06013 | Mar. 09, 2000 |
| US00/06013 | Non-provisional of | US60/168,662 | Dec. 03, 1999 |
| US00/06013 | Non-provisional of | US60/138,626 | Jun. 11, 1999 |
| US00/06013 | Non-provisional of | US60/125,360 | Mar. 19, 1999 |
| US09/950,082 | Continuation-in-part of | PCT/US00/06049 | Mar. 09, 2000 |
| US00/06049 | Non-provisional of | US60/168,667 | Dec. 03, 1999 |
| US00/06049 | Non-provisional of | US60/138,574 | Jun. 11, 1999 |
| US00/06049 | Non-provisional of | US60/124,144 | Mar. 12, 1999 |
| US09/950,082 | Continuation-in-part of | PCT/US00/06057 | Mar. 09, 2000 |
| US00/06057 | Non-provisional of | US60/168,666 | Dec. 03, 1999 |
| US00/06057 | Non-provisional of | US60/138,597 | Jun. 11, 1999 |
| US00/06057 | Non-provisional of | US60/124,142 | Mar. 12, 1999 |
| US09/950,082 | Continuation-in-part of | PCT/US00/06824 | Mar. 16, 2000 |
| US00/06824 | Non-provisional of | US60/168,664 | Dec. 03, 1999 |
| US00/06824 | Non-provisional of | US60/125,359 | Mar. 19, 1999 |
| US09/950,082 | Continuation-in-part of | PCT/US00/06765 | Mar. 16, 2000 |
| US00/06765 | Non-provisional of | US60/169,906 | Dec. 10, 1999 |
| US00/06765 | Non-provisional of | US60/126,051 | Mar. 23, 1999 |
| US09/950,082 | Continuation-in-part of | PCT/US00/06792 | Mar. 16, 2000 |
| US00/06792 | Non-provisional of | US60/169,980 | Dec. 10, 1999 |
| US00/06792 | Non-provisional of | US60/125,362 | Mar. 19, 1999 |
| US09/950,082 | Continuation-in-part of | PCT/US00/06830 | Mar. 16, 2000 |
| US00/06830 | Non-provisional of | US60/169,910 | Dec. 10, 1999 |
| US00/06830 | Non-provisional of | US60/125,361 | Mar. 19, 1999 |
| US09/950,082 | Continuation-in-part of | PCT/US00/06782 | Mar. 16, 2000 |
| US00/06782 | Non-provisional of | US60/169,936 | Dec. 10, 1999 |
| US00/06782 | Non-provisional of | US60/125,812 | Mar. 23, 1999 |
| US09/950,082 | Continuation-in-part of | PCT/US00/06822 | Mar. 16, 2000 |
| US00/06822 | Non-provisional of | US60/169,916 | Dec. 10, 1999 |
| US00/06822 | Non-provisional of | US60/126,054 | Mar. 23, 1999 |
| US09/950,082 | Continuation-in-part of | PCT/US00/06791 | Mar. 16, 2000 |
| US00/06791 | Non-provisional of | US60/169,946 | Dec. 10, 1999 |
| US00/06791 | Non-provisional of | US60/125,815 | Mar. 23, 1999 |
| US09/950,082 | Continuation-in-part of | PCT/US00/06828 | Mar. 16, 2000 |
| US00/06828 | Non-provisional of | US60/169,616 | Dec. 08, 1999 |
| US00/06828 | Non-provisional of | US60/125,358 | Mar. 19, 1999 |
| US09/950,082 | Continuation-in-part of | PCT/US00/06823 | Mar. 16, 2000 |
| US00/06823 | Non-provisional of | US60/169,623 | Dec. 08, 1999 |
| US00/06823 | Non-provisional of | US60/125,364 | Mar. 19, 1999 |
| US09/950,082 | Continuation-in-part of | PCT/US00/06781 | Mar. 16, 2000 |
| US00/06781 | Non-provisional of | US60/169,617 | Dec. 08, 1999 |
| US00/06781 | Non-provisional of | US60/125,363 | Mar. 19, 1999 |
| US09/950,082 | Continuation-in-part of | PCT/US00/07505 | Mar. 22, 2000 |
| US00/07505 | Non-provisional of | US60/172,410 | Dec. 17, 1999 |
| US00/07505 | Non-provisional of | US60/126,502 | Mar. 26, 1999 |
| US09/950,082 | Continuation-in-part of | PCT/US00/07440 | Mar. 22, 2000 |
| US00/07440 | Non-provisional of | US60/172,409 | Dec. 17, 1999 |
| US00/07440 | Non-provisional of | US60/126,503 | Mar. 26, 1999 |
| US09/950,082 | Continuation-in-part of | PCT/US00/07506 | Mar. 22, 2000 |
| US00/07506 | Non-provisional of | US60/172,412 | Dec. 17, 1999 |
| US00/07506 | Non-provisional of | US60/126,505 | Mar. 26, 1999 |
| US09/950,082 | Continuation-in-part of | PCT/US00/07507 | Mar. 22, 2000 |
| US00/07507 | Non-provisional of | US60/172,408 | Dec. 17, 1999 |
| US00/07507 | Non-provisional of | US60/126,594 | Mar. 26, 1999 |
| US09/950,082 | Continuation-in-part of | PCT/US00/07535 | Mar. 22, 2000 |
| US00/07535 | Non-provisional of | US60/172,413 | Dec. 17, 1999 |
| US00/07535 | Non-provisional of | US60/126,511 | Mar. 26, 1999 |
| US09/950,082 | Continuation-in-part of | PCT/US00/07525 | Mar. 22, 2000 |
| US00/07525 | Non-provisional of | US60/171,549 | Dec. 22, 1999 |
| US00/07525 | Non-provisional of | US60/126,595 | Mar. 26, 1999 |
| US09/950,082 | Continuation-in-part of | PCT/US00/07534 | Mar. 22, 2000 |
| US00/07534 | Non-provisional of | US60/171,504 | Dec. 22, 1999 |
| US00/07534 | Non-provisional of | US60/126,598 | Mar. 26, 1999 |
| US09/950,082 | Continuation-in-part of | PCT/US00/07483 | Mar. 22, 2000 |
| US00/07483 | Non-provisional of | US60/171,552 | Dec. 22, 1999 |
| US00/07483 | Non-provisional of | US60/126,596 | Mar. 26, 1999 |
| US09/950,082 | Continuation-in-part of | PCT/US00/07526 | Mar. 22, 2000 |
| US00/07526 | Non-provisional of | US60/171,550 | Dec. 22, 1999 |
| US00/07526 | Non-provisional of | US60/126,600 | Mar. 26, 1999 |
| US09/950,082 | Continuation-in-part of | PCT/US00/07527 | Mar. 22, 2000 |
| US00/07527 | Non-provisional of | US60/171,551 | Dec. 22, 1999 |
| US00/07527 | Non-provisional of | US60/126,501 | Mar. 26, 1999 |
| US09/950,082 | Continuation-in-part of | PCT/US00/07661 | Mar. 23, 2000 |
| US00/07661 | Non-provisional of | US60/174,847 | Jan. 07, 2000 |
| US00/07661 | Non-provisional of | US60/126,504 | Mar. 26, 1999 |
| US09/950,082 | Continuation-in-part of | PCT/US00/07579 | Mar. 23, 2000 |
| US00/07579 | Non-provisional of | US60/174,853 | Jan. 07, 2000 |
| US00/07579 | Non-provisional of | US60/126,509 | Mar. 26, 1999 |
| US09/950,082 | Continuation-in-part of | PCT/US00/07723 | Mar. 23, 2000 |
| US00/07723 | Non-provisional of | US60/242,710 | Oct. 25, 2000 |
| US00/07723 | Non-provisional of | US60/174,852 | Jan. 07, 2000 |
| US00/07723 | Non-provisional of | US60/126,506 | Mar. 26, 1999 |
| US09/950,082 | Continuation-in-part of | PCT/US00/07724 | Mar. 23, 2000 |
| US00/07724 | Non-provisional of | US60/174,850 | Jan. 07, 2000 |
| US00/07724 | Non-provisional of | US60/126,510 | Mar. 26, 1999 |
| US09/950,082 | Continuation-in-part of | PCT/US00/14929 | Jun. 01, 2000 |
| US00/14929 | Non-provisional of | US60/174,851 | Jan. 07, 2000 |
| US00/14929 | Non-provisional of | US60/138,573 | Jun. 11, 1999 |
| US09/950,082 | Continuation-in-part of | PCT/US00/07722 | Mar. 23, 2000 |
| US00/07722 | Non-provisional of | US60/174,871 | Jan. 07, 2000 |
| US00/07722 | Non-provisional of | US60/126,508 | Mar. 26, 1999 |
| US09/950,082 | Continuation-in-part of | PCT/US00/07578 | Mar. 23, 2000 |
| US00/07578 | Non-provisional of | US60/174,872 | Jan. 07, 2000 |
| US00/07578 | Non-provisional of | US60/126,507 | Mar. 26, 1999 |
| US09/950,082 | Continuation-in-part of | PCT/US00/07726 | Mar. 23, 2000 |
| US00/07726 | Non-provisional of | US60/174,877 | Jan. 07, 2000 |
| US00/07726 | Non-provisional of | US60/126,597 | Mar. 26, 1999 |
| US09/950,082 | Continuation-in-part of | PCT/US00/07677 | Mar. 23, 2000 |
| US00/07677 | Non-provisional of | US60/176,064 | Jan. 14, 2000 |
| US00/07677 | Non-provisional of | US60/154,373 | Sep. 17, 1999 |
| US00/07677 | Non-provisional of | US60/126,601 | Mar. 26, 1999 |
| US09/950,082 | Continuation-in-part of | PCT/US00/07725 | Mar. 23, 2000 |
| US00/07725 | Non-provisional of | US60/176,063 | Jan. 14, 2000 |
| US00/07725 | Non-provisional of | US60/126,602 | Mar. 26, 1999 |
| US09/950,082 | Continuation-in-part of | PCT/US00/09070 | Apr. 06, 2000 |
| US00/09070 | Non-provisional of | US60/176,052 | Jan. 14, 2000 |
| US00/09070 | Non-provisional of | US60/128,695 | Apr. 09, 1999 |
| US09/950,082 | Continuation-in-part of | PCT/US00/08982 | Apr. 06, 2000 |
| US00/08982 | Non-provisional of | US60/176,069 | Jan. 14, 2000 |
| US00/08982 | Non-provisional of | US60/128,696 | Apr. 09, 1999 |
| US09/950,082 | Continuation-in-part of | PCT/US00/08983 | Apr. 06, 2000 |
| US00/08983 | Non-provisional of | US60/176,068 | Jan. 14, 2000 |
| US00/08983 | Non-provisional of | US60/128,703 | Apr. 09, 1999 |
| US09/950,082 | Continuation-in-part of | PCT/US00/09067 | Apr. 06, 2000 |
| US00/09067 | Non-provisional of | US60/176,929 | Jan. 20, 2000 |
| US00/09067 | Non-provisional of | US60/128,697 | Apr. 09, 1999 |
| US09/950,082 | Continuation-in-part of | PCT/US00/09066 | Apr. 06, 2000 |
| US00/09066 | Non-provisional of | US60/176,926 | Jan. 20, 2000 |
| US00/09066 | Non-provisional of | US60/128,698 | Apr. 09, 1999 |
| US09/950,082 | Continuation-in-part of | PCT/US00/09068 | Apr. 06, 2000 |
| US00/09068 | Non-provisional of | US60/177,050 | Jan. 20, 2000 |
| US00/09068 | Non-provisional of | US60/128,699 | Apr. 09, 1999 |
| US09/950,082 | Continuation-in-part of | PCT/US00/08981 | Apr. 06, 2000 |
| US00/08981 | Non-provisional of | US60/177,166 | Jan. 20, 2000 |
| US00/08981 | Non-provisional of | US60/128,701 | Apr. 09, 1999 |
| US09/950,082 | Continuation-in-part of | PCT/US00/08980 | Apr. 06, 2000 |
| US00/08980 | Non-provisional of | US60/176,930 | Jan. 20, 2000 |
| US00/08980 | Non-provisional of | US60/128,700 | Apr. 09, 1999 |
| US09/950,082 | Continuation-in-part of | PCT/US00/09071 | Apr. 06, 2000 |
| US00/09071 | Non-provisional of | US60/176,931 | Jan. 20, 2000 |
| US00/09071 | Non-provisional of | US60/128,694 | Apr. 09, 1999 |
| US09/950,082 | Continuation-in-part of | PCT/US00/09069 | Apr. 06, 2000 |
| US00/09069 | Non-provisional of | US60/177,049 | Jan. 20, 2000 |
| US00/09069 | Non-provisional of | US60/128,702 | Apr. 09, 1999 |
| US09/950,082 | Continuation-in-part of | PCT/US00/15136 | Jun. 01, 2000 |
| US00/15136 | Non-provisional of | US60/138,629 | Jun. 11, 1999 |
| US09/950,082 | Continuation-in-part of | PCT/US00/14926 | Jun. 01, 2000 |
| US00/14926 | Non-provisional of | US60/138,628 | Jun. 11, 1999 |
| US09/950,082 | Continuation-in-part of | PCT/US00/14963 | Jun. 01, 2000 |
| US00/14963 | Non-provisional of | US60/138,631 | Jun. 11, 1999 |
| US09/950,082 | Continuation-in-part of | PCT/US00/15135 | Jun. 01, 2000 |
| US00/15135 | Non-provisional of | US60/138,632 | Jun. 11, 1999 |
| US09/950,082 | Continuation-in-part of | PCT/US00/14934 | Jun. 01, 2000 |
| US00/14934 | Non-provisional of | US60/138,599 | Jun. 11, 1999 |
| US09/950,082 | Continuation-in-part of | PCT/US00/14933 | Jun. 01, 2000 |
| US00/14933 | Non-provisional of | US60/138,572 | Jun. 11, 1999 |
| US09/950,082 | Continuation-in-part of | PCT/US00/15137 | Jun. 01, 2000 |
| US00/15137 | Non-provisional of | US60/138,625 | Jun. 11, 1999 |
| US09/950,082 | Continuation-in-part of | PCT/US00/14928 | Jun. 01, 2000 |
| US00/14928 | Non-provisional of | US60/138,633 | Jun. 11, 1999 |
| US09/950,082 | Continuation-in-part of | PCT/US00/14973 | Jun. 01, 2000 |
| US00/14973 | Non-provisional of | US60/,138,630 | Jun. 11, 1999 |
| US09/950,082 | Continuation-in-part of | PCT/US00/14964 | Jun. 01, 2000 |
| US00/14964 | Non-provisional of | US60/138,627 | Jun. 11, 1999 |
| US09/950,082 | Continuation-in-part of | PCT/US00/26376 | Sep. 26, 2000 |
| US00/26376 | Non-provisional of | US60/155,808 | Sep. 27, 1999 |
| US09/950,082 | Continuation-in-part of | PCT/US00/26371 | Sep. 26, 2000 |
| US00/26371 | Non-provisional of | US60/155,804 | Sep. 27, 1999 |
| US09/950,082 | Continuation-in-part of | PCT/US00/26324 | Sep. 26, 2000 |
| US00/26324 | Non-provisional of | US60/155,807 | Sep. 27, 1999 |
| US09/950,082 | Continuation-in-part of | PCT/US00/26323 | Sep. 26, 2000 |
| US00/26323 | Non-provisional of | US60/155,805 | Sep. 27, 1999 |
| US09/950,082 | Continuation-in-part of | PCT/US00/26337 | Sep. 26, 2000 |
| US00/26337 | Non-provisional of | US60/155,806 | Sep. 27, 1999 |
| US09/950,082 | Continuation-in-part of | US01/13318 | Apr. 27, 2001 |
| US01/13318 | Non-provisional of | US60/212,142 | Jun. 16, 2000 |
| US01/13318 | Non-provisional of | US60/201,194 | May 02, 2000 |
| 10/105,299 | Continuation-in-part of | US09/950,083 | Sep. 12, 2001 |
| US09/950,083 | Non-provisional of | US60/278,650 | Mar. 27, 2001 |
| US09/950,083 | Continuation-in-part of | PCT/US00/06043 | Mar. 09, 2000 |
| US00/06043 | Non-provisional of | US60/167,061 | Nov. 23, 1999 |
| US00/06043 | Non-provisional of | US60/124,146 | Mar. 12, 1999 |
| US09/950,083 | Continuation-in-part of | PCT/US00/06012 | Mar. 09, 2000 |
| US00/06012 | Non-provisional of | US60/166,989 | Nov. 23, 1999 |
| US00/06012 | Non-provisional of | US60/124,093 | Mar. 12, 1999 |
| US09/950,083 | Continuation-in-part of | PCT/US00/06058 | Mar. 09, 2000 |
| US00/06058 | Non-provisional of | US60/168,654 | Dec. 03, 1999 |
| US00/06058 | Non-provisional of | US60/124,145 | Mar. 12, 1999 |
| US09/950,083 | Continuation-in-part of | PCT/US00/06044 | Mar. 09, 2000 |
| US00/06044 | Non-provisional of | US60/168,661 | Dec. 03, 1999 |
| US00/06044 | Non-provisional of | US60/124,099 | Mar. 12, 1999 |
| US09/950,083 | Continuation-in-part of | PCT/US00/06059 | Mar. 09, 2000 |
| US00/06059 | Non-provisional of | US60/168,622 | Dec. 03, 1999 |
| US00/06059 | Non-provisional of | US60/124,096 | Mar. 12, 1999 |
| US09/950,083 | Continuation-in-part of | PCT/US00/06042 | Mar. 09, 2000 |
| US00/06042 | Non-provisional of | US60/168,663 | Dec. 03, 1999 |
| US00/06042 | Non-provisional of | US60/124,143 | Mar. 12, 1999 |
| US09/950,083 | Continuation-in-part of | PCT/US00/06014 | Mar. 09, 2000 |
| US00/06014 | Non-provisional of | US60/168,665 | Dec. 03, 1999 |
| US00/06014 | Non-provisional of | US60/138,598 | Jun. 11, 1999 |
| US00/06014 | Non-provisional of | US60/124,095 | Mar. 12, 1999 |
| US09/950,083 | Continuation-in-part of | PCT/US00/06013 | Mar. 09, 2000 |
| US00/06013 | Non-provisional of | US60/168,662 | Dec. 03, 1999 |
| US00/06013 | Non-provisional of | US60/138,626 | Jun. 11, 1999 |
| US00/06013 | Non-provisional of | US60/125,360 | Mar. 19, 1999 |
| US09/950,083 | Continuation-in-part of | PCT/US00/06049 | Mar. 09, 2000 |
| US00/06049 | Non-provisional of | US60/168,667 | Dec. 03, 1999 |
| US00/06049 | Non-provisional of | US60/138,574 | Jun. 11, 1999 |
| US00/06049 | Non-provisional of | US60/124,144 | Mar. 12, 1999 |
| US09/950,083 | Continuation-in-part of | PCT/US00/06057 | Mar. 09, 2000 |
| US00/06057 | Non-provisional of | US60/168,666 | Dec. 03, 1999 |
| US00/06057 | Non-provisional of | US60/138,597 | Jun. 11, 1999 |
| US00/06057 | Non-provisional of | US60/124,142 | Mar. 12, 1999 |
| US09/950,083 | Continuation-in-part of | PCT/US00/06824 | Mar. 16, 2000 |
| US00/06824 | Non-provisional of | US60/168,664 | Dec. 03, 1999 |
| US00/06824 | Non-provisional of | US60/125,359 | Mar. 19, 1999 |
| US09/950,083 | Continuation-in-part of | PCT/US00/06765 | Mar. 16, 2000 |
| US00/06765 | Non-provisional of | US60/169,906 | Dec. 10, 1999 |
| US00/06765 | Non-provisional of | US60/126,051 | Mar. 23, 1999 |
| US09/950,083 | Continuation-in-part of | PCT/US00/06792 | Mar. 16, 2000 |
| US00/06792 | Non-provisional of | US60/169,980 | Dec. 10, 1999 |
| US00/06792 | Non-provisional of | US60/125,362 | Mar. 19, 1999 |
| US09/950,083 | Continuation-in-part of | PCT/US00/06830 | Mar. 16, 2000 |
| US00/06830 | Non-provisional of | US60/169,910 | Dec. 10, 1999 |
| US00/06830 | Non-provisional of | US60/125,361 | Mar. 19, 1999 |
| US09/950,083 | Continuation-in-part of | PCT/US00/06782 | Mar. 16, 2000 |
| US00/06782 | Non-provisional of | US60/169,936 | Dec. 10, 1999 |
| US00/06782 | Non-provisional of | US60/125,812 | Mar. 23, 1999 |
| US09/950,083 | Continuation-in-part of | PCT/US00/06822 | Mar. 16, 2000 |
| US00/06822 | Non-provisional of | US60/169,916 | Dec. 10, 1999 |
| US00/06822 | Non-provisional of | US60/126,054 | Mar. 23, 1999 |
| US09/950,083 | Continuation-in-part of | PCT/US00/06791 | Mar. 16, 2000 |
| US00/06791 | Non-provisional of | US60/169,946 | Dec. 10, 1999 |
| US00/06791 | Non-provisional of | US60/125,815 | Mar. 23, 1999 |
| US09/950,083 | Continuation-in-part of | PCT/US00/06828 | Mar. 16, 2000 |
| US00/06828 | Non-provisional of | US60/169,616 | Dec. 08, 1999 |
| US00/06828 | Non-provisional of | US60/125,358 | Mar. 19, 1999 |
| US09/950,083 | Continuation-in-part of | PCT/US00/06823 | Mar. 16, 2000 |
| US00/06823 | Non-provisional of | US60/169,623 | Dec. 08, 1999 |
| US00/06823 | Non-provisional of | US60/125,364 | Mar. 19, 1999 |
| US09/950,083 | Continuation-in-part of | PCT/US00/06781 | Mar. 16, 2000 |
| US00/06781 | Non-provisional of | US60/169,617 | Dec. 08, 1999 |
| US00/06781 | Non-provisional of | US60/125,363 | Mar. 19, 1999 |
| US09/950,083 | Continuation-in-part of | PCT/US00/07505 | Mar. 22, 2000 |
| US00/07505 | Non-provisional of | US60/172,410 | Dec. 17, 1999 |
| US00/07505 | Non-provisional of | US60/126,502 | Mar. 26, 1999 |
| US09/950,083 | Continuation-in-part of | PCT/US00/07440 | Mar. 22, 2000 |
| US00/07440 | Non-provisional of | US60/172,409 | Dec. 17, 1999 |
| US00/07440 | Non-provisional of | US60/126,503 | Mar. 26, 1999 |
| US09/950,083 | Continuation-in-part of | PCT/US00/07506 | Mar. 22, 2000 |
| US00/07506 | Non-provisional of | US60/172,412 | Dec. 17, 1999 |
| US00/07506 | Non-provisional of | US60/126,505 | Mar. 26, 1999 |
| US09/950,083 | Continuation-in-part of | PCT/US00/07507 | Mar. 22, 2000 |
| US00/07507 | Non-provisional of | US60/172,408 | Dec. 17, 1999 |
| US00/07507 | Non-provisional of | US60/126,594 | Mar. 26, 1999 |
| US09/950,083 | Continuation-in-part of | PCT/US00/07535 | Mar. 22, 2000 |
| US00/07535 | Non-provisional of | US60/172,413 | Dec. 17, 1999 |
| US00/07535 | Non-provisional of | US60/126,511 | Mar. 26, 1999 |
| US09/950,083 | Continuation-in-part of | PCT/US00/07525 | Mar. 22, 2000 |
| US00/07525 | Non-provisional of | US60/171,549 | Dec. 22, 1999 |
| US00/07525 | Non-provisional of | US60/126,595 | Mar. 26, 1999 |
| US09/950,083 | Continuation-in-part of | PCT/US00/07534 | Mar. 22, 2000 |
| US00/07534 | Non-provisional of | US60/171,504 | Dec. 22, 1999 |
| US00/07534 | Non-provisional of | US60/126,598 | Mar. 26, 1999 |
| US09/950,083 | Continuation-in-part of | PCT/US00/07483 | Mar. 22, 2000 |
| US00/07483 | Non-provisional of | US60/171,552 | Dec. 22, 1999 |
| US00/07483 | Non-provisional of | US60/126,596 | Mar. 26, 1999 |
| US09/950,083 | Continuation-in-part of | PCT/US00/07526 | Mar. 22, 2000 |
| US00/07526 | Non-provisional of | US60/171,550 | Dec. 22, 1999 |
| US00/07526 | Non-provisional of | US60/126,600 | Mar. 26, 1999 |
| US09/950,083 | Continuation-in-part of | PCT/US00/07527 | Mar. 22, 2000 |
| US00/07527 | Non-provisional of | US60/171,551 | Dec. 22, 1999 |
| US00/07527 | Non-provisional of | US60/126,501 | Mar. 26, 1999 |
| US09/950,083 | Continuation-in-part of | PCT/US00/07661 | Mar. 23, 2000 |
| US00/07661 | Non-provisional of | US60/174,847 | Jan. 07, 2000 |
| US00/07661 | Non-provisional of | US60/126,504 | Mar. 26, 1999 |
| US09/950,083 | Continuation-in-part of | PCT/US00/07579 | Mar. 23, 2000 |
| US00/07579 | Non-provisional of | US60/174,853 | Jan. 07, 2000 |
| US00/07579 | Non-provisional of | US60/126,509 | Mar. 26, 1999 |
| US09/950,083 | Continuation-in-part of | PCT/US00/07723 | Mar. 23, 2000 |
| US00/07723 | Non-provisional of | US60/242,710 | Oct. 25, 2000 |
| US00/07723 | Non-provisional of | US60/174,852 | Jan. 07, 2000 |
| US00/07723 | Non-provisional of | US60/126,506 | Mar. 26, 1999 |
| US09/950,083 | Continuation-in-part of | PCT/US00/07724 | Mar. 23, 2000 |
| US00/07724 | Non-provisional of | US60/174,850 | Jan. 07, 2000 |
| US00/07724 | Non-provisional of | US60/126,510 | Mar. 26, 1999 |
| US09/950,083 | Continuation-in-part of | PCT/US00/14929 | Jun. 01, 2000 |
| US00/14929 | Non-provisional of | US60/174,851 | Jan. 07, 2000 |
| US00/14929 | Non-provisional of | US60/138,573 | Jun. 11, 1999 |
| US09/950,083 | Continuation-in-part of | PCT/US00/07722 | Mar. 23, 2000 |
| US00/07722 | Non-provisional of | US60/174,871 | Jan. 07, 2000 |
| US00/07722 | Non-provisional of | US60/126,508 | Mar. 26, 1999 |
| US09/950,083 | Continuation-in-part of | PCT/US00/07578 | Mar. 23, 2000 |
| US00/07578 | Non-provisional of | US60/174,872 | Jan. 07, 2000 |
| US00/07578 | Non-provisional of | US60/126,507 | Mar. 26, 1999 |
| US09/950,083 | Continuation-in-part of | PCT/US00/07726 | Mar. 23, 2000 |
| US00/07726 | Non-provisional of | US60/174,877 | Jan. 07, 2000 |
| US00/07726 | Non-provisional of | US60/126,597 | Mar. 26, 1999 |
| US09/950,083 | Continuation-in-part of | PCT/US00/07677 | Mar. 23, 2000 |
| US00/07677 | Non-provisional of | US60/176,064 | Jan. 14, 2000 |
| US00/07677 | Non-provisional of | US60/154,373 | Sep. 17, 1999 |
| US00/07677 | Non-provisional of | US60/126,601 | Mar. 26, 1999 |
| US09/950,083 | Continuation-in-part of | PCT/US00/07725 | Mar. 23, 2000 |
| US00/07725 | Non-provisional of | US60/176,063 | Jan. 14, 2000 |
| US00/07725 | Non-provisional of | US60/126,602 | Mar. 26, 1999 |
| US09/950,083 | Continuation-in-part of | PCT/US00/09070 | Apr. 06, 2000 |
| US00/09070 | Non-provisional of | US60/176,052 | Jan. 14, 2000 |
| US00/09070 | Non-provisional of | US60/128,695 | Apr. 09, 1999 |
| US09/950,083 | Continuation-in-part of | PCT/US00/08982 | Apr. 06, 2000 |
| US00/08982 | Non-provisional of | US60/176,069 | Jan. 14, 2000 |
| US00/08982 | Non-provisional of | US60/128,696 | Apr. 09, 1999 |
| US09/950,083 | Continuation-in-part of | PCT/US00/08983 | Apr. 06, 2000 |
| US00/08983 | Non-provisional of | US60/176,068 | Jan. 14, 2000 |
| US00/08983 | Non-provisional of | US60/128,703 | Apr. 09, 1999 |
| US09/950,083 | Continuation-in-part of | PCT/US00/09067 | Apr. 06, 2000 |
| US00/09067 | Non-provisional of | US60/176,929 | Jan. 20, 2000 |
| US00/09067 | Non-provisional of | US60/128,697 | Apr. 09, 1999 |
| US09/950,083 | Continuation-in-part of | PCT/US00/09066 | Apr. 06, 2000 |
| US00/09066 | Non-provisional of | US60/176,926 | Jan. 20, 2000 |
| US00/09066 | Non-provisional of | US60/128,698 | Apr. 09, 1999 |
| US09/950,083 | Continuation-in-part of | PCT/US00/09068 | Apr. 06, 2000 |
| US00/09068 | Non-provisional of | US60/177,050 | Jan. 20, 2000 |
| US00/09068 | Non-provisional of | US60/128,699 | Apr. 09, 1999 |
| US09/950,083 | Continuation-in-part of | PCT/US00/08981 | Apr. 06, 2000 |
| US00/08981 | Non-provisional of | US60/177,166 | Jan. 20, 2000 |
| US00/08981 | Non-provisional of | US60/128,701 | Apr. 09, 1999 |
| US09/950,083 | Continuation-in-part of | PCT/US00/08980 | Apr. 06, 2000 |
| US00/08980 | Non-provisional of | US60/176,930 | Jan. 20, 2000 |
| US00/08980 | Non-provisional of | US60/128,700 | Apr. 09, 1999 |
| US09/950,083 | Continuation-in-part of | PCT/US00/09071 | Apr. 06, 2000 |
| US00/09071 | Non-provisional of | US60/176,931 | Jan. 20, 2000 |
| US00/09071 | Non-provisional of | US60/128,694 | Apr. 09, 1999 |
| US09/950,083 | Continuation-in-part of | PCT/US00/09069 | Apr. 06, 2000 |
| US00/09069 | Non-provisional of | US60/177,049 | Jan. 20, 2000 |
| US00/09069 | Non-provisional of | US60/128,702 | Apr. 09, 1999 |
| US09/950,083 | Continuation-in-part of | PCT/US00/15136 | Jun. 01, 2000 |
| US00/15136 | Non-provisional of | US60/138,629 | Jun. 11, 1999 |
| US09/950,083 | Continuation-in-part of | PCT/US00/14926 | Jun. 01, 2000 |
| US00/14926 | Non-provisional of | US60/138,628 | Jun. 11, 1999 |
| US09/950,083 | Continuation-in-part of | PCT/US00/14963 | Jun. 01, 2000 |
| US00/14963 | Non-provisional of | US60/138,631 | Jun. 11, 1999 |
| US09/950,083 | Continuation-in-part of | PCT/US00/15135 | Jun. 01, 2000 |
| US00/15135 | Non-provisional of | US60/138,632 | Jun. 11, 1999 |
| US09/950,083 | Continuation-in-part of | PCT/US00/14934 | Jun. 01, 2000 |
| US00/14934 | Non-provisional of | US60/138,599 | Jun. 11, 1999 |
| US09/950,083 | Continuation-in-part of | PCT/US00/14933 | Jun. 01, 2000 |
| US00/14933 | Non-provisional of | US60/138,572 | Jun. 11, 1999 |
| US09/950,083 | Continuation-in-part of | PCT/US00/15137 | Jun. 01, 2000 |
| US00/15137 | Non-provisional of | US60/138,625 | Jun. 11, 1999 |
| US09/950,083 | Continuation-in-part of | PCT/US00/14928 | Jun. 01, 2000 |
| US00/14928 | Non-provisional of | US60/138,633 | Jun. 11, 1999 |
| US09/950,083 | Continuation-in-part of | PCT/US00/14973 | Jun. 01, 2000 |
| US00/14973 | Non-provisional of | US60/,138,630 | Jun. 11, 1999 |
| US09/950,083 | Continuation-in-part of | PCT/US00/14964 | Jun. 01, 2000 |
| US00/14964 | Non-provisional of | US60/138,627 | Jun. 11, 1999 |
| US09/950,083 | Continuation-in-part of | PCT/US00/26376 | Sep. 26, 2000 |
| US00/26376 | Non-provisional of | US60/155,808 | Sep. 27, 1999 |
| US09/950,083 | Continuation-in-part of | PCT/US00/26371 | Sep. 26, 2000 |
| US00/26371 | Non-provisional of | US60/155,804 | Sep. 27, 1999 |
| US09/950,083 | Continuation-in-part of | PCT/US00/26324 | Sep. 26, 2000 |
| US00/26324 | Non-provisional of | US60/155,807 | Sep. 27, 1999 |
| US09/950,083 | Continuation-in-part of | PCT/US00/26323 | Sep. 26, 2000 |
| US00/26323 | Non-provisional of | US60/155,805 | Sep. 27, 1999 |
| US09/950,083 | Continuation-in-part of | PCT/US00/26337 | Sep. 26, 2000 |
| US00/26337 | Non-provisional of | US60/155,806 | Sep. 27, 1999 |
| US09/950,083 | Continuation-in-part of | US01/13318 | Apr. 27, 2001 |
| US01/13318 | Non-provisional of | US60/212,142 | Jun. 16, 2000 |
| US01/13318 | Non-provisional of | US60/201,194 | May 02, 2000 |

; wherein each of the above applications are all herein incorporated by reference in their entirety.

### FIELD OF THE INVENTION

[0002] The present invention relates to human secreted proteins/polypeptides, and isolated nucleic acid molecules encoding said proteins/polypeptides, useful for detecting, preventing, diagnosing, prognosticating, treating, and/or ameliorating allergic and/or asthmatic diseases and disorders. Antibodies that bind these polypeptides are also encompassed by the present invention. Also encompassed by the invention are vectors, host cells, and recombinant and synthetic methods for producing said polynucleotides, polypeptides, and/or antibodies. The invention further encompasses screening methods for identifying agonists and antagonists of polynucleotides and polypeptides of the invention. The present invention further encompasses methods and compositions for inhibiting or enhancing the production and function of the polypeptides of the present invention.

### BACKGROUND OF THE INVENTION

[0003] The immune system is an intricate network of cells, tissues and soluble molecules that function to protect the body from invasion by foreign substances and pathogens. The major cells of the immune system are lymphocytes, including B cells and T cells, and myeloid cells, including basophils, eosinophils, neutrophils, mast cells, monocytes, macrophages and dendritic cells. In addition to these cellular components of the immune system, soluble molecules—such as antibodies, complement proteins, and cytokines—circulate in lymph and blood plasma, and play important roles in immunity.

[0004] The immune system can be subdivided into the acquired and innate immune systems. The cells of the innate immune system (e.g., neutrophils, eosinophils, basophils, mast cells) are not antigen specific and their action is not enhanced by repeated exposure to the same antigen. The cells of the acquired immune system (B and T cells) are antigen specific. Repeated exposure of B and T cells to an antigen results in improved immune responses (memory responses) produced by these cell types. The cells and products of the acquired immune system can recruit components of the innate system to mount a focused immune response. For a more extensive review of the immune system, see Fundamental Immunology, 4th edition, Ed. William Paul, Lippincott-Raven Pub. (1998).

[0005] An immune response is seldom carried out by a single cell type, but rather requires the coordinated efforts of several cell types. In order to coordinate an immune response, it is necessary that cells of the immune system communicate with each other and with other cells of the body. Communication between cells may be made by cell-cell contact, between membrane bound molecules on each cell, or by the interaction of soluble components of the immune system with cellular receptors. Signaling between cell types may have one or more of a variety of consequences, including activation, proliferation, differentiation, and apoptosis. Activation and differentiation of immune cells may result in the expression or secretion of polypeptides, or other molecules, which in turn affect the function of other cells and/or molecules of the immune system.

[0006] The genes and proteins associated with this coordinated immune response are essential for the proper regulation and functioning of the immune system. Dysregulation of immune system-related genes and proteins may result in a variety of diseases and/or disorders, including immediate hypersensitivity diseases. Immediate hypersensitivity diseases, such as asthma, hay fever, and allergic conjunctivitis, are characterized by similar physiological mechanisms and generally are initiated by environmental antigens (e.g. pollen, dust, or molds). Patients suffering from the effects of these disorders are predisposed to react to specific external antigens. When these antigens contact certain tissues, such as ocular, nasal, or lung tissues, those tissues initiate an immune response and produce undesirable and frequently life-threatening symptoms. Over 35 million Americans suffer from allergic disorders, such as seasonal allergic rhinitis (hay fever), and asthma affects about 10 million Americans. These conditions are not only becoming more common but also more serious, with more people being hospitalized.

[0007] Molecules that stimulate or suppress immune system function are known as immunomodulators. These molecules, which include endogenous proteins (e.g., cytokines, cytokine receptors, and intracellular signal transduction molecules), molecules derived from microorganisms, and synthetic agents, may exert their modulatory effects at one or more stages of the immune response, such as antigen recognition, stimulation of cytokine production and release, and/or activation/differentiation of lymphocytes and myeloid cells. Immunomodulators may enhance (immunoprophylaxis, immunostimulation), restore (immunosubstitution, immunorestoration) or suppress (immunosuppression, immunodeviation) immunological functions or activities.

[0008] Immunomodulatory compounds have many important applications in clinical practice. For example, immunosuppressing agents (which attenuate or prevent unwanted immune responses) can be used to prevent immediate hypersensitivity reactions such as asthma and allergic reactions. A mechanism of action common to many immunosuppressants is the inhibition of T cell activation and/or differentiation. Antilymphocyte antibodies have also been used to attenuate immune system functions. Currently used immunosuppressive agents can produce a number of side effects, which limit their use. Among the most serious secondary effects include kidney and liver toxicity, increased risk of infection, hyperglycemia, neoplasia, and osteoporosis (see, e.g., Freeman, Clin. Biochem. 24(1):9-14 (1991); Mitchison, Dig. Dis. 11(2):78-101 (1993)). The discovery of new human allergy and/or asthma related polynucleotides, the polypeptides encoded by them, and antibodies that specifically bind these polypeptides, satisfies a need in the art by providing new compositions that are useful in the diagnosis, treatment, prevention and/or prognosis of disorders of the immune system, including, but not limited to, allergic reactions and conditions, asthma, and related immediate hypersensitivity disorders.

### SUMMARY OF THE INVENTION

[0009] The present invention encompasses human secreted proteins/polypeptides, and isolated nucleic acid molecules encoding said proteins/polypeptides, useful for detecting, preventing, diagnosing, prognosticating, treating, and/or ameliorating allergic and/or asthmatic diseases and disorders. Antibodies that bind these polypeptides are also encompassed by the present invention; as are vectors, host cells, and recombinant and synthetic methods for producing said polynucleotides, polypeptides, and/or antibodies. The invention further encompasses screening methods for identifying agonists and antagonists of polynucleotides and polypeptides of the invention. The present invention also encompasses methods and compositions for inhibiting or enhancing the production and function of the polypeptides of the present invention.

### DETAILED DESCRIPTION

Polynucleotides and Polypeptides of the Invention

Description of Table 1A

[0010] Table 1A summarizes information concerning certain polypnucleotides and polypeptides of the invention. The first column provides the gene number in the application for each clone identifier. The second column provides a unique clone identifier, “Clone ID:”, for a cDNA clone related to each contig sequence disclosed in Table 1A. Third column, the cDNA Clones identified in the second column were deposited as indicated in the third column (i.e. by ATCC Deposit No: Z and deposit date). Some of the deposits contain multiple different clones corresponding to the same gene. In the fourth column, “Vector” refers to the type of vector contained in the corresponding cDNA Clone identified in the second column. In the fifth column, the nucleotide sequence identified as “NT SEQ ID NO:X” was assembled from partially homologous (“overlapping”) sequences obtained from the corresponding cDNA clone identified in the second column and, in some cases, from additional related cDNA clones. The overlapping sequences were assembled into a single contiguous sequence of high redundancy (usually three to five overlapping sequences at each nucleotide position), resulting in a final sequence identified as SEQ ID NO:X. In the sixth column, “Total NT Seq.” refers to the total number of nucleotides in the contig sequence identified as SEQ ID NO:X.” The deposited clone may contain all or most of these sequences, reflected by the nucleotide position indicated as “5′ NT of Clone Seq.” (seventh column) and the “3′ NT of Clone Seq.” (eighth column) of SEQ ID NO:X. In the ninth column, the nucleotide position of SEQ ID NO:X of the putative start codon (methionine) is identified as “5′ NT of Start Codon.” Similarly, in column ten, the nucleotide position of SEQ ID NO:X of the predicted signal sequence is identified as “5′ NT of First AA of Signal Pep.” In the eleventh column, the translated amino acid sequence, beginning with the methionine, is identified as “AA SEQ ID NO:Y,” although other reading frames can also be routinely translated using known molecular biology techniques. The polypeptides produced by these alternative open reading frames are specifically contemplated by the present invention.

[0011] In the twelfth and thirteenth columns of Table 1A, the first and last amino acid position of SEQ ID NO:Y of the predicted signal peptide is identified as “First AA of Sig Pep” and “Last AA of Sig Pep.” In the fourteenth column, the predicted first amino acid position of SEQ ID NO:Y of the secreted portion is identified as “Predicted First AA of Secreted Portion”. The amino acid position of SEQ ID NO:Y of the last amino acid encoded by the open reading frame is identified in the fifteenth column as “Last AA of ORF”.

[0012] SEQ ID NO:X (where X may be any of the polynucleotide sequences disclosed in the sequence listing) and the translated SEQ ID NO:Y (where Y may be any of the polypeptide sequences disclosed in the sequence listing) are sufficiently accurate and otherwise suitable for a variety of uses well known in the art and described further below. For instance, SEQ ID NO:X is useful for designing nucleic acid hybridization probes that will detect nucleic acid sequences contained in SEQ ID NO:X or the cDNA contained in the deposited clone. These probes will also hybridize to nucleic acid molecules in biological samples, thereby enabling a variety of forensic and diagnostic methods of the invention. Similarly, polypeptides identified from SEQ ID NO:Y may be used, for example, to generate antibodies which bind specifically to proteins containing the polypeptides and the secreted proteins encoded by the cDNA clones identified in Table 1A and/or elsewhere herein

[0013] Nevertheless, DNA sequences generated by sequencing reactions can contain sequencing errors. The errors exist as misidentified nucleotides, or as insertions or deletions of nucleotides in the generated DNA sequence. The erroneously inserted or deleted nucleotides cause frame shifts in the reading frames of the predicted amino acid sequence. In these cases, the predicted amino acid sequence diverges from the actual amino acid sequence, even though the generated DNA sequence may be greater than 99.9% identical to the actual DNA sequence (for example, one base insertion or deletion in an open reading frame of over 1000 bases).

[0014] Accordingly, for those applications requiring precision in the nucleotide sequence or the amino acid sequence, the present invention provides not only the generated nucleotide sequence identified as SEQ ID NO:X, and the predicted translated amino acid sequence identified as SEQ ID NO:Y, but also a sample of plasmid DNA containing a human cDNA of the invention deposited with the ATCC, as set forth in Table 1A. The nucleotide sequence of each deposited plasmid can readily be determined by sequencing the deposited plasmid in accordance with known methods

[0015] The predicted amino acid sequence can then be verified from such deposits. Moreover, the amino acid sequence of the protein encoded by a particular plasmid can also be directly determined by peptide sequencing or by expressing the protein in a suitable host cell containing the deposited human cDNA, collecting the protein, and determining its sequence.

[0016] Also provided in Table 1A is the name of the vector which contains the cDNA plasmid. Each vector is routinely used in the art. The following additional information is provided for convenience.

[0017] Vectors Lambda Zap (U.S. Pat. Nos. 5,128,256 and 5,286,636), Uni-Zap XR (U.S. Pat. Nos. 5,128,256 and 5,286,636), Zap Express (U.S. Pat. Nos. 5,128,256 and 5,286,636), pBluescript (pBS) (Short, J. M. et al., Nucleic Acids Res. 16:7583-7600 (1988); Alting-Mees, M. A. and Short, J. M., Nucleic Acids Res. 17:9494 (1989)) and pBK (Alting-Mees, M. A. et al., Strategies 5:58-61 (1992)) are commercially available from Stratagene Cloning Systems, Inc., 11011 N. Torrey Pines Road, La Jolla, Calif., 92037. pBS contains an ampicillin resistance gene and pBK contains a neomycin resistance gene. Phagemid pBS may be excised from the Lambda Zap and Uni-Zap XR vectors, and phagemid pBK may be excised from the Zap Express vector. Both phagemids may be transformed into E. coli strain XL-1 Blue, also available from Stratagene

[0018] Vectors pSport1, pCMVSport 1.0, pCMVSport 2.0 and pCMVSport 3.0, were obtained from Life Technologies, Inc., P.O. Box 6009, Gaithersburg, Md. 20897. All Sport vectors contain an ampicillin resistance gene and may be transformed into E. coli strain DH10B, also available from Life Technologies. See, for instance, Gruber, C. E., et al., Focus 15:59 (1993). Vector lafmid BA (Bento Soares, Columbia University, New York, N.Y.) contains an ampicillin resistance gene and can be transformed into E. coli strain XL-1 Blue. Vector pCR®2.1, which is available from Invitrogen, 1600 Faraday Avenue, Carlsbad, Calif. 92008, contains an ampicillin resistance gene and may be transformed into E. coli strain DH10B, available from Life Technologies. See, for instance, Clark, J. M., Nuc. Acids Res. 16.9677-9686 (1988) and Mead, D. et al., Bio/Technology 9: (1991).

[0019] The present invention also relates to the genes corresponding to SEQ ID NO:X, SEQ ID NO:Y, and/or a deposited cDNA (cDNA Clone ID). The corresponding gene can be isolated in accordance with known methods using the sequence information disclosed herein. Such methods include, but are not limited to, preparing probes or primers from the disclosed sequence and identifying or amplifying the corresponding gene from appropriate sources of genomic material.

[0020] Also provided in the present invention are allelic variants, orthologs, and/or species homologs. Procedures known in the art can be used to obtain full-length genes, allelic variants, splice variants, full-length coding portions, orthologs, and/or species homologs of genes corresponding to SEQ ID NO:X and SEQ ID NO:Y using information from the sequences disclosed herein or the clones deposited with the ATCC. For example, allelic variants and/or species homologs may be isolated and identified by making suitable probes or primers from the sequences provided herein and screening a suitable nucleic acid source for allelic variants and/or the desired homologue.

[0021] The present invention provides a polynucleotide comprising, or alternatively consisting of, the nucleic acid sequence of SEQ ID NO:X and/or a cDNA contained in ATCC Deposit No. Z. The present invention also provides a polypeptide comprising, or alternatively, consisting of, the polypeptide sequence of SEQ ID NO:Y, a polypeptide encoded by SEQ ID NO:X, and/or a polypeptide encoded by a cDNA contained in ATCC deposit No. Z. Polynucleotides encoding a polypeptide comprising, or alternatively consisting of the polypeptide sequence of SEQ ID NO:Y, a polypeptide encoded by SEQ ID NO:X and/or a polypeptide encoded by the cDNA contained in ATCC Deposit No. Z, are also encompassed by the invention. The present invention further encompasses a polynucleotide comprising, or alternatively consisting of the complement of the nucleic acid sequence of SEQ ID NO:X, and/or the complement of the coding strand of the cDNA contained in ATCC Deposit No. Z.

Description of Table 1B (Comprised of Tables 1B.1 and 1B.2)

[0022] Table 1B.1 and Table 1B.2 summarize some of the polynucleotides encompassed by the invention (including cDNA clones related to the sequences (Clone ID:), contig sequences (contig identifier (Contig ID:) and contig nucleotide sequence identifiers (SEQ ID NO:X)) and further summarizes certain characteristics of these polynucleotides and the polypeptides encoded thereby. The first column of Tables 1B.1 and 1B.2 provide the gene numbers in the application for each clone identifier. The second column of Tables 1B.1 and 1B.2 provide unique clone identifiers, “Clone ID:”, for cDNA clones related to each contig sequence disclosed in Table 1A and/or Table 1B. The third column of Tables 1B.1 and 1B.2 provide unique contig identifiers, “Contig ID:” for each of the contig sequences disclosed in these tables. The fourth column of Tables 1B.1 and 1B.2 provide the sequence identifiers, “SEQ ID NO:X”, for each of the contig sequences disclosed in Table 1A and/or 1B.

[0023] Table 1B.1

[0024] The fifth column of Table 1B.1, “ORF (From-To)”, provides the location (i.e., nucleotide position numbers) within the polynucleotide sequence of SEQ ID NO:X that delineates the preferred open reading frame (ORF) that encodes the amino acid sequence shown in the sequence listing and referenced in Table 1B.1 as SEQ ID NO:Y (column 6). Column 7 of Table 1B.1 lists residues comprising predicted epitopes contained in the polypeptides encoded by each of the preferred ORFs (SEQ ID NO:Y). Identification of potential immunogenic regions was performed according to the method of Jameson and Wolf (CABIOS, 4; 181-186 (1988)); specifically, the Genetics Computer Group (GCG) implementation of this algorithm, embodied in the program PEPTIDESTRUCTURE (Wisconsin Package v10.0, Genetics Computer Group (GCG), Madison, Wis.). This method returns a measure of the probability that a given residue is found on the surface of the protein. Regions where the antigenic index score is greater than 0.9 over at least 6 amino acids are indicated in Table 1B.1 as “Predicted Epitopes”. In particular embodiments, polypeptides of the invention comprise, or alternatively consist of, one, two, three, four, five or more of the predicted epitopes described in Table 1B.1. It will be appreciated that depending on the analytical criteria used to predict antigenic determinants, the exact address of the determinant may vary slightly. Column 8 of Table 1B.1 (“Cytologic Band”) provides the chromosomal location of polynucleotides corresponding to SEQ ID NO:X. Chromosomal location was determined by finding exact matches to EST and cDNA sequences contained in the NCBI (National Center for Biotechnology Information) UniGene database. Given a presumptive chromosomal location, disease locus association was determined by comparison with the Morbid Map, derived from Online Mendelian Inheritance in Man (Online Mendelian Inheritance in Man, OMIM™. McKusick-Nathans Institute for Genetic Medicine, Johns Hopkins University (Baltimore, Md.) and National Center for Biotechnology Information, National Library of Medicine (Bethesda, Md.) 2000. World Wide Web URL: http://www.ncbi.nlm.nih.gov/omim/). If the putative chromosomal location of the Query overlaps with the chromosomal location of a Morbid Map entry, an OMIM identification number is disclosed in Table 1B.1, column 9 labeled “OMIM Disease Reference(s)”. A key to the OMIM reference identification numbers is provided in Table 5.

[0025] Table 1B.2

[0026] Column 5 of Table 1B.2, “Tissue Distribution” shows the expression profile of tissue, cells, and/or cell line libraries which express the polynucleotides of the invention. The first code number shown in Table 1B.2 column 5 (preceding the colon), represents the tissue/cell source identifier code corresponding to the key provided in Table 4. Expression of these polynucleotides was not observed in the other tissues and/or cell libraries tested. The second number in column 5 (following the colon), represents the number of times a sequence corresponding to the reference polynucleotide sequence (e.g., SEQ ID NO:X) was identified in the corresponding tissue/cell source. Those tissue/cell source identifier codes in which the first two letters are “AR” designate information generated using DNA array technology. Utilizing this technology, cDNAs were amplified by PCR and then transferred, in duplicate, onto the array. Gene expression was assayed through hybridization of first strand cDNA probes to the DNA array. cDNA probes were generated from total RNA extracted from a variety of different tissues and cell lines. Probe synthesis was performed in the presence of ³³P dCTP, using oligo(dT) to prime reverse transcription. After hybridization, high stringency washing conditions were employed to remove non-specific hybrids from the array. The remaining signal, emanating from each gene target, was measured using a Phosphorimager. Gene expression was reported as Phosphor Stimulating Luminescence (PSL) which reflects the level of phosphor signal generated from the probe hybridized to each of the gene targets represented on the array. A local background signal subtraction was performed before the total signal generated from each array was used to normalize gene expression between the different hybridizations. The value presented after “[array code]:” represents the mean of the duplicate values, following background subtraction and probe normalization. One of skill in the art could routinely use this information to identify normal and/or diseased tissue(s) which show a predominant expression pattern of the corresponding polynucleotide of the invention or to identify polynucleotides which show predominant and/or specific tissue and/or cell expression.

Description of Table 1C

[0027] Table 1C summarizes additional polynucleotides encompassed by the invention (including cDNA clones related to the sequences (Clone ID:), contig sequences (contig identifier (Contig ID:) contig nucleotide sequence identifiers (SEQ ID NO:X)), and genomic sequences (SEQ ID NO:B). The first column provides a unique clone identifier, “Clone ID:”, for a cDNA clone related to each contig sequence. The second column provides the sequence identifier, “SEQ ID NO:X”, for each contig sequence. The third column provides a unique contig identifier, “Contig ID:” for each contig sequence. The fourth column, provides a BAC identifier “BAC ID NO:A” for the BAC clone referenced in the corresponding row of the table. The fifth column provides the nucleotide sequence identifier, “SEQ ID NO:B” for a fragment of the BAC clone identified in column four of the corresponding row of the table. The sixth column, “Exon From-To”, provides the location (i.e., nucleotide position numbers) within the polynucleotide sequence of SEQ ID NO:B which delineate certain polynucleotides of the invention that are also exemplary members of polynucleotide sequences that encode polypeptides of the invention (e.g., polypeptides containing amino acid sequences encoded by the polynucleotide sequences delineated in column six, and fragments and variants thereof).

Description of Table 1D

[0028] Table 1D: In preferred embodiments, the present invention encompasses a method of detecting, preventing, diagnosing, prognosticating, treating, and/or ameliorating allergic and/or asthmatic diseases and disorders; comprising administering to a patient in which such treatment, prevention, or amelioration is desired a protein, nucleic acid, or antibody of the invention (or fragment or variant thereof) represented by Table 1A, Table 1B, and Table 1C, in an amount effective to detect, prevent, diagnose, prognosticate, treat, and/or ameliorate the disease or disorder.

[0029] As indicated in Table 1D, the polynucleotides, polypeptides, agonists, or antagonists of the present invention (including antibodies) can be used in assays to test for one or more biological activities. If these polynucleotides and polypeptides do exhibit activity in a particular assay, it is likely that these molecules may be involved in the diseases associated with the biological activity. Thus, the polynucleotides or polypeptides, or agonists or antagonists thereof (including antibodies) could be used to treat the associated disease.

[0030] Table 1D provides information related to biological activities for polynucleotides and polypeptides of the invention (including antibodies, agonists, and/or antagonists thereof). Table 1D also provides information related to assays which may be used to test polynucleotides and polypeptides of the invention (including antibodies, agonists, and/or antagonists thereof) for the corresponding biological activities. The first column (“Gene No.”) provides the gene number in the application for each clone identifier. The second column (“cDNA Clone ID:”) provides the unique clone identifier for each clone as previously described and indicated in Tables 1A, 1B, and 1C. The third column (“AA SEQ ID NO:Y”) indicates the Sequence Listing SEQ ID Number for polypeptide sequences encoded by the corresponding cDNA clones (also as indicated in Tables 1A, 1B, and 2). The fourth column (“Biological Activity”) indicates a biological activity corresponding to the indicated polypeptides (or polynucleotides encoding said polypeptides). The fifth column (“Exemplary Activity Assay”) further describes the corresponding biological activity and provides information pertaining to the various types of assays that may be performed to test, demonstrate, or quantify the corresponding biological activity. Table 1D describes the use of FMAT technology, inter alia, for testing or demonstrating various biological activities. Fluorometric microvolume assay technology (FMAT) is a fluorescence-based system that provides a means to perform nonradioactive cell- and bead-based assays to detect activation of cell signal transduction pathways. This technology was designed specifically for ligand binding and immunological assays. Using this technology, fluorescent cells or beads at the bottom of the well are detected as localized areas of concentrated fluorescence using a data processing system. Unbound flurophore comprising the background signal is ignored, allowing for a wide variety of homogeneous assays. FMAT technology may be used for peptide ligand binding assays, immunofluorescence, apoptosis, cytotoxicity, and bead-based immunocapture assays. See, Miraglia S et. al., “Homogeneous cell and bead based assays for highthroughput screening using flourometric microvolume assay technology,” Journal of Biomolecular Screening; 4:193-204 (1999). In particular, FMAT technology may be used to test, confirm, and/or identify the ability of polypeptides (including polypeptide fragments and variants) to activate signal transduction pathways. For example, FMAT technology may be used to test, confirm, and/or identify the ability of polypeptides to upregulate production of immunomodulatory proteins (such as, for example, interleukins, GM-CSF, Rantes, and Tumor Necrosis factors, as well as other cellular regulators (e.g. insulin)).

[0031] Table 1D also describes the use of kinase assays for testing, demonstrating, or quantifying biological activity. In this regard, the phosphorylation and de-phosphorylation of specific amino acid residues (e.g. Tyrosine, Serine, Threonine) on cell-signal transduction proteins provides a fast, reversible means for activation and de-activation of cellular signal transduction pathways. Moreover, cell signal transduction via phosphorylation/de-phosphorylation is crucial to the regulation of a wide variety of cellular processes (e.g. proliferation, differentiation, migration, apoptosis, etc.). Accordingly, kinase assays provide a powerful tool useful for testing, confirming, and/or identifying polypeptides (including polypeptide fragments and variants) that mediate cell signal transduction events via protein phosphorylation. See e.g., Forrer, P., Tamaskovic R., and Jaussi, R. “Enzyme-Linked Immunosorbent Assay for Measurement of JNK, ERK, and p38 Kinase Activities” Biol. Chem. 379(8-9): 1101-1110 (1998).

Description of Table 1E

[0032] Polynucleotides encoding polypeptides of the present invention can be used in assays to test for one or more biological activities. One such biological activity which may be tested includes the ability of polynucleotides and polypeptides of the invention to stimulate up-regulation or down-regulation of expression of particular genes and proteins. Hence, if polynucleotides and polypeptides of the present invention exhibit activity in altering particular gene and protein expression patterns, it is likely that these polynucleotides and polypeptides of the present invention may be involved in, or capable of effecting changes in, diseases associated with the altered gene and protein expression profiles. Hence, polynucleotides, polypeptides, or antibodies of the present invention could be used to treat said associated diseases.

[0033] TaqMan® assays may be performed to assess the ability of polynucleotides (and polypeptides they encode) to alter the expression pattern of particular “target” genes. TaqMan® reactions are performed to evaluate the ability of a test agent to induce or repress expression of specific genes in different cell types. TaqMan® gene expression quantification assays (“TaqMan® assays”) are well known to, and routinely performed by, those of ordinary skill in the art. TaqMan® assays are performed in a two step reverse transcription/polymerase chain reaction (RT-PCR). In the first (RT) step, cDNA is reverse transcribed from total RNA samples using random hexamer primers. In the second (PCR) step, PCR products are synthesized from the cDNA using gene specific primers.

[0034] To quantify gene expression the Taqman® PCR reaction exploits the 5′ nuclease activity of AmpliTaq Gold® DNA Polymerase to cleave a Taqman® probe (distinct from the primers) during PCR. The Taqman® probe contains a reporter dye at the 5′-end of the probe and a quencher dye at the 3′ end of the probe. When the probe is intact, the proximity of the reporter dye to the quencher dye results in suppression of the reporter fluorescence. During PCR, if the target of interest is present, the probe specifically anneals between the forward and reverse primer sites. AmpliTaq Fold DNA Polymerase then cleaves the probe between the reporter and quencher when the probe hybridizes to the target, resulting in increased fluorescence of the reporter (see FIG. 2). Accumulation of PCR products is detected directly by monitoring the increase in fluorescence of the reporter dye.

[0035] After the probe fragments are displaced from the target, polymerization of the strand continues. The 3′-end of the probe is blocked to prevent extension of the probe during PCR. This process occurs in every cycle and does not interfere with the exponential accumulation of product. The increase in fluorescence signal is detected only if the target sequence is complementary to the probe and is amplified during PCR. Because of these requirements, any nonspecific amplification is not detected.

[0036] For test sample preparation, vector controls or constructs containing the coding sequence for the gene of interest are transfected into cells, such as for example 293T cells, and supernatants collected after 48 hours. For cell treatment and RNA isolation, multiple primary human cells or human cell lines are used; such cells may include but are not limited to, Normal Human Dermal Fibroblasts, Aortic Smooth Muscle, Human Umbilical Vein Endothelial Cells, HepG2, Daudi, Jurkat, U937, Caco, and THP-1 cell lines. Cells are plated in growth media and growth is arrested by culturing without media change for 3 days, or by switching cells to low serum media and incubating overnight. Cells are treated for 1, 6, or 24 hours with either vector control supernatant or sample supernatant (or purified/partially purified protein preparations in buffer). Total RNA is isolated; for example, by using Trizol extraction or by using the Ambion RNAqueous™-4PCR RNA isolation system. Expression levels of multiple genes are analyzed using TAQMAN, and expression in the test sample is compared to control vector samples to identify genes induced or repressed. Each of the above described techniques are well known to, and routinely performed by, those of ordinary skill in the art.

[0037] Table 1E indicates particular disease classes and preferred indications for which polynucleotides, polypeptides, or antibodies of the present invention may be used in detecting, diagnosing, preventing, treating and/or ameliorating said diseases and disorders based on “target” gene expression patterns which may be up- or down-regulated by polynucleotides (and the encoded polypeptides) corresponding to each indicated cDNA Clone ID (shown in Table 1E, Column 2).

[0038] Thus, in preferred embodiments, the present invention encompasses a method of detecting, diagnosing, preventing, treating, and/or ameliorating a disease or disorder listed in the “Disease Class” and/or “Preferred Indication” columns of Table 1E; comprising administering to a patient in which such detection, diagnosis, prevention, or treatment is desired a protein, nucleic acid, or antibody of the invention (or fragment or variant thereof) in an amount effective to detect, diagnose, prevent, treat, or ameliorate the disease or disorder. The first and second columns of Table 1D show the “Gene No.” and “cDNA Clone ID No.”, respectively, indicating certain nucleic acids and proteins (or antibodies against the same) of the invention (including polynucleotide, polypeptide, and antibody fragments or variants thereof) that may be used in detecting, diagnosing, preventing, treating, or ameliorating the disease(s) or disorder(s) indicated in column 6 and as indicated in the corresponding row in the “Disease Class” or “Preferred Indication” Columns of Table 1E.

[0039] In another embodiment, the present invention also encompasses methods of detecting, diagnosing, preventing, treating, or ameliorating a disease or disorder listed in the “Disease Class” or “Preferred Indication” Columns of Table 1E; comprising administering to a patient combinations of the proteins, nucleic acids, or antibodies of the invention (or fragments or variants thereof), sharing similar indications as shown in the corresponding rows in the “Disease Class” or “Preferred Indication” Columns of Table 1E.

[0040] The “Disease Class” Column of Table 1E provides a categorized descriptive heading for diseases, disorders, and/or conditions (more fully described below) that may be detected, diagnosed, prevented, treated, or ameliorated by a protein, nucleic acid, or antibody of the invention (or fragment or variant thereof).

[0041] The “Preferred Indication” Column of Table 1E describes diseases, disorders, and/or conditions that may be detected, diagnosed, prevented, treated, or ameliorated by a protein, nucleic acid, or antibody of the invention (or fragment or variant thereof).

[0042] The “Cell Line” and “Exemplary Targets” Columns of Table 1E indicate particular cell lines and target genes, respectively, which may show altered gene expression patterns (i.e., up- or down-regulation of the indicated target gene) in Taqman assays, performed as described above, utilizing polynucleotides of the cDNA Clone ID shown in the corresponding row. Alteration of expression patterns of the indicated “Exemplary Target” genes is correlated with a particular “Disease Class” and/or “Preferred Indication” as shown in the corresponding row under the respective column headings.

[0043] The “Exemplary Accessions” Column indicates GenBank Accessions (available online through the National Center for Biotechnology Information (NCBI) at http://www.ncbi.nlm.nih.gov/) which correspond to the “Exemplary Targets” shown in the adjacent row.

[0044] The recitation of “Cancer” in the “Disease Class” Column indicates that the corresponding nucleic acid and protein, or antibody against the same, of the invention (or fragment or variant thereof) may be used for example, to detect, diagnose, prevent, treat, and/or ameliorate neoplastic diseases and/or disorders (e.g., leukemias, cancers, etc., as described below under “Hyperproliferative Disorders”).

[0045] The recitation of “Immune” in the “Disease Class” column indicates that the corresponding nucleic acid and protein, or antibody against the same, of the invention (or fragment or variant thereof), may be used for example, to detect, diagnose, prevent, treat, and/or ameliorate diseases and/or disorders relating to neoplastic diseases (e.g., as described below under “Hyperproliferative Disorders”), blood disorders (e.g., as described below under “Immune Activity” “Cardiovascular Disorders” and/or “Blood-Related Disorders”), and infections (e.g., as described below under “Infectious Disease”).

[0046] The recitation of “Angiogenesis” in the “Disease Class” column indicates that the corresponding nucleic acid and protein, or antibody against the same, of the invention (or fragment or variant thereof), may be used for example, to detect, diagnose, treat, prevent, and/or ameliorate diseases and/or disorders relating to neoplastic diseases (e.g., as described below under “Hyperproliferative Disorders”), diseases and/or disorders of the cardiovascular system (e.g., as described below under “Cardiovascular Disorders”), diseases and/or disorders involving cellular and genetic abnormalities (e.g., as described below under “Diseases at the Cellular Level”), diseases and/or disorders involving angiogenesis (e.g., as described below under “Anti-Angiogenesis Activity”), to promote or inhibit cell or tissue regeneration (e.g., as described below under “Regeneration”), or to promote wound healing (e.g., as described below under “Wound Healing and Epithelial Cell Proliferation”).

[0047] The recitation of “Diabetes” in the “Disease Class” column indicates that the corresponding nucleic acid and protein, or antibody against the same, of the invention (or fragment or variant thereof), may be used for example, to detect, diagnose, treat, prevent, and/or ameliorate diabetes (including diabetes mellitus types I and II), as well as diseases and/or disorders associated with, or consequential to, diabetes (e.g. as described below under “Endocrine Disorders,” “Renal Disorders,” and “Gastrointestinal Disorders”).

Description of Table 2

[0048] Table 2 summarizes homology and features of some of the polypeptides of the invention. The first column provides a unique clone identifier, “Clone ID:”, corresponding to a cDNA clone disclosed in Table 1A or Table 1B. The second column provides the unique contig identifier, “Contig ID:” corresponding to contigs in Table 1B and allowing for correlation with the information in Table 1B. The third column provides the sequence identifier, “SEQ ID NO:X”, for the contig polynucleotide sequence. The fourth column provides the analysis method by which the homology/identity disclosed in the Table was determined. Comparisons were made between polypeptides encoded by the polynucleotides of the invention and either a non-redundant protein database (herein referred to as “NR”), or a database of protein families (herein referred to as “PFAM”) as further described below. The fifth column provides a description of the PFAM/NR hit having a significant match to a polypeptide of the invention. Column six provides the accession number of the PFAM/NR hit disclosed in the fifth column. Column seven, “Score/Percent Identity”, provides a quality score or the percent identity, of the hit disclosed in columns five and six. Columns 8 and 9, “NT From” and “NT To” respectively, delineate the polynucleotides in “SEQ ID NO:X” that encode a polypeptide having a significant match to the PFAM/NR database as disclosed in the fifth and sixth columns. In specific embodiments polypeptides of the invention comprise, or alternatively consist of, an amino acid sequence encoded by a polynucleotide in SEQ ID NO:X as delineated in columns 8 and 9, or fragments or variants thereof.

Description of Table 3

[0049] Table 3 provides polynucleotide sequences that may be disclaimed according to certain embodiments of the invention. The first column provides a unique clone identifier, “Clone ID”, for a cDNA clone related to contig sequences disclosed in Table 1B. The second column provides the sequence identifier, “SEQ ID NO:X”, for contig sequences disclosed in Table 1A and/or Table 1B. The third column provides the unique contig identifier, “Contig ID:”, for contigs disclosed in Table 1B. The fourth column provides a unique integer ‘a’ where ‘a’ is any integer between 1 and the final nucleotide minus 15 of SEQ ID NO:X, and the fifth column provides a unique integer ‘b’ where ‘b’ is any integer between 15 and the final nucleotide of SEQ ID NO:X, where both a and b correspond to the positions of nucleotide residues shown in SEQ ID NO:X, and where b is greater than or equal to a+14. For each of the polynucleotides shown as SEQ ID NO:X, the uniquely defined integers can be substituted into the general formula of a-b, and used to describe polynucleotides which may be preferably excluded from the invention. In certain embodiments, preferably excluded from the invention are at least one, two, three, four, five, ten, or more of the polynucleotide sequence(s) having the accession number(s) disclosed in the sixth column of this Table (including for example, published sequence in connection with a particular BAC clone). In further embodiments, preferably excluded from the invention are the specific polynucleotide sequence(s) contained in the clones corresponding to at least one, two, three, four, five, ten, or more of the available material having the accession numbers identified in the sixth column of this Table (including for example, the actual sequence contained in an identified BAC clone).

Description of Table 4

[0050] Table 4 provides a key to the tissue/cell source identifier code disclosed in Table 1B.2, column 5. Column 1 of Table 4 provides the tissue/cell source identifier code disclosed in Table 1B.2, column 5. Columns 2-5 provide a description of the tissue or cell source. Note that “Description” and “Tissue” sources (i.e. columns 2 and 3) having the prefix “a_” indicates organs, tissues, or cells derived from “adult” sources. Codes corresponding to diseased tissues are indicated in column 6 with the word “disease.” The use of the word “disease” in column 6 is non-limiting. The tissue or cell source may be specific (e.g. a neoplasm), or may be disease-associated (e.g., a tissue sample from a normal portion of a diseased organ). Furthermore, tissues and/or cells lacking the “disease” designation may still be derived from sources directly or indirectly involved in a disease state or disorder, and therefore may have a further utility in that disease state or disorder. In numerous cases where the tissue/cell source is a library, column 7 identifies the vector used to generate the library.

Description of Table 5

[0051] Table 5 provides a key to the OMIM reference identification numbers disclosed in Table 1B.1, column 9. OMIM reference identification numbers (Column 1) were derived from Online Mendelian Inheritance in Man (Online Mendelian Inheritance in Man, OMIM. McKusick-Nathans Institute for Genetic Medicine, Johns Hopkins University (Baltimore, Md.) and National Center for Biotechnology Information, National Library of Medicine, (Bethesda, Md.) 2000. World Wide Web URL: http://www.ncbi.nlm.nih.gov/omim/). Column 2 provides diseases associated with the cytologic band disclosed in Table 1B.1, column 8, as determined using the Morbid Map database.

Description of Table 6

[0052] Table 6 summarizes some of the ATCC Deposits, Deposit dates, and ATCC designation numbers of deposits made with the ATCC in connection with the present application. These deposits were made in addition to those described in the Table 1A.

Description of Table 7

[0053] Table 7 shows the cDNA libraries sequenced, and ATCC designation numbers and vector information relating to these cDNA libraries.

[0054] The first column shows the first four letters indicating the Library from which each library clone was derived. The second column indicates the catalogued tissue description for the corresponding libraries. The third column indicates the vector containing the corresponding clones. The fourth column shows the ATCC deposit designation for each libray clone as indicated by the deposit information in Table 6.

Definitions

[0055] The following definitions are provided to facilitate understanding of certain terms used throughout this specification.

[0056] In the present invention, “isolated” refers to material removed from its original environment (e.g., the natural environment if it is naturally occurring), and thus is altered “by the hand of man” from its natural state. For example, an isolated polynucleotide could be part of a vector or a composition of matter, or could be contained within a cell, and still be “isolated” because that vector, composition of matter, or particular cell is not the original environment of the polynucleotide. The term “isolated” does not refer to genomic or cDNA libraries, whole cell total or mRNA preparations, genomic DNA preparations (including those separated by electrophoresis and transferred onto blots), sheared whole cell genomic DNA preparations or other compositions where the art demonstrates no distinguishing features of the polynucleotide/sequences of the present invention.

[0057] In the present invention, a “secreted” protein refers to those proteins capable of being directed to the ER, secretory vesicles, or the extracellular space as a result of a signal sequence, as well as those proteins released into the extracellular space without necessarily containing a signal sequence. If the secreted protein is released into the extracellular space, the secreted protein can undergo extracellular processing to produce a “mature” protein. Release into the extracellular space can occur by many mechanisms, including exocytosis and proteolytic cleavage.

[0058] As used herein, a “polynucleotide” refers to a molecule having a nucleic acid sequence encoding SEQ ID NO:Y or a fragment or variant thereof (e.g., the polypeptide delinated in columns fourteen and fifteen of Table 1A); a nucleic acid sequence contained in SEQ ID NO:X (as described in column 5 of Table 1A and/or column 3 of Table 1B) or the complement thereof; a cDNA sequence contained in Clone ID: (as described in column 2 of Table 1A and/or Table 1B and contained within a library deposited with the ATCC); a nucleotide sequence encoding the polypeptide encoded by a nucleotide sequence in SEQ ID NO:B as defined in column 6 (EXON From-To) of Table 1C or a fragment or variant thereof; or a nucleotide coding sequence in SEQ ID NO:B as defined in column 6 of Table 1C or the complement thereof. For example, the polynucleotide can contain the nucleotide sequence of the full-length cDNA sequence, including the 5′ and 3′ untranslated sequences, the coding region, as well as fragments, epitopes, domains, and variants of the nucleic acid sequence. Moreover, as used herein, a “polypeptide” refers to a molecule having an amino acid sequence encoded by a polynucleotide of the invention as broadly defined (obviously excluding poly-Phenylalanine or poly-Lysine peptide sequences which result from translation of a polyA tail of a sequence corresponding to a cDNA).

[0059] In the present invention, “SEQ ID NO:X” was often generated by overlapping sequences contained in multiple clones (contig analysis). A representative clone containing all or most of the sequence for SEQ ID NO:X is deposited at Human Genome Sciences, Inc. (HGS) in a catalogued and archived library. As shown, for example, in column 2 of Table 1B, each clone is identified by a cDNA Clone ID (identifier generally referred to herein as Clone ID:). Each Clone ID is unique to an individual clone and the Clone ID is all the information needed to retrieve a given clone from the HGS library. Table 7 provides a list of the deposited cDNA libraries. One can use the Clone ID: to determine the library source by reference to Tables 6 and 7. Table 7 lists the deposited cDNA libraries by name and links each library to an ATCC Deposit. Library names contain four characters, for example, “HTWE.” The name of a cDNA clone (Clone ID) isolated from that library begins with the same four characters, for example “HTWEP07”. As mentioned below, Table 1A and/or Table 1B correlates the Clone ID names with SEQ ID NO:X. Thus, starting with an SEQ ID NO:X, one can use Tables 1A, 1B, 6, 7, and 9 to determine the corresponding Clone ID, which library it came from and which ATCC deposit the library is contained in. Furthermore, it is possible to retrieve a given cDNA clone from the source library by techniques known in the art and described elsewhere herein. The ATCC is located at 10801 University Boulevard, Manassas, Va. 20110-2209, USA. The ATCC deposits were made pursuant to the terms of the Budapest Treaty on the international recognition of the deposit of microorganisms for the purposes of patent procedure.

[0060] In specific embodiments, the polynucleotides of the invention are at least 15, at least 30, at least 50, at least 100, at least 125, at least 500, or at least 1000 continuous nucleotides but are less than or equal to 300 kb, 200 kb, 100 kb, 50 kb, 15 kb, 10 kb, 7.5 kb, 5 kb, 2.5 kb, 2.0 kb, or 1 kb, in length. In a further embodiment, polynucleotides of the invention comprise a portion of the coding sequences, as disclosed herein, but do not comprise all or a portion of any intron. In another embodiment, the polynucleotides comprising coding sequences do not contain coding sequences of a genomic flanking gene (i.e., 5′ or 3′ to the gene of interest in the genome). In other embodiments, the polynucleotides of the invention do not contain the coding sequence of more than 1000, 500, 250, 100, 50, 25, 20, 15, 10, 5, 4, 3, 2, or 1 genomic flanking gene(s).

[0061] A “polynucleotide” of the present invention also includes those polynucleotides capable of hybridizing, under stringent hybridization conditions, to sequences contained in SEQ ID NO:X, or the complement thereof (e.g., the complement of any one, two, three, four, or more of the polynucleotide fragments described herein), the polynucleotide sequence delineated in columns 7 and 8 of Table 1A or the complement thereof, the polynucleotide sequence delineated in columns 8 and 9 of Table 2 or the complement thereof, and/or cDNA sequences contained in Clone ID: (e.g., the complement of any one, two, three, four, or more of the polynucleotide fragments, or the cDNA clone within the pool of cDNA clones deposited with the ATCC, described herein), and/or the polynucleotide sequence delineated in column 6 of Table 1C or the complement thereof. “Stringent hybridization conditions” refers to an overnight incubation at 42 degree C. in a solution comprising 50% formamide, 5×SSC (750 mM NaCl, 75 mM trisodium citrate), 50 mM sodium phosphate (pH 7.6), 5× Denhardt's solution, 10% dextran sulfate, and 20 μg/ml denatured, sheared salmon sperm DNA, followed by washing the filters in 0.1×SSC at about 65 degree C.

[0062] Also contemplated are nucleic acid molecules that hybridize to the polynucleotides of the present invention at lower stringency hybridization conditions. Changes in the stringency of hybridization and signal detection are primarily accomplished through the manipulation of formamide concentration (lower percentages of formamide result in lowered stringency); salt conditions, or temperature. For example, lower stringency conditions include an overnight incubation at 37 degree C. in a solution comprising 6×SSPE (20×SSPE=3M NaCl; 0.2M NaH₂PO₄; 0.02M EDTA, pH 7.4), 0.5% SDS, 30% formamide, 100 ug/ml salmon sperm blocking DNA; followed by washes at 50 degree C. with 1×SSPE, 0.1% SDS. In addition, to achieve even lower stringency, washes performed following stringent hybridization can be done at higher salt concentrations (e.g. 5×SSC).

[0063] Note that variations in the above conditions may be accomplished through the inclusion and/or substitution of alternate blocking reagents used to suppress background in hybridization experiments. Typical blocking reagents include Denhardt's reagent, BLOTTO, heparin, denatured salmon sperm DNA, and commercially available proprietary formulations. The inclusion of specific blocking reagents may require modification of the hybridization conditions described above, due to problems with compatibility.

[0064] Of course, a polynucleotide which hybridizes only to polyA+ sequences (such as any 3′ terminal polyA+ tract of a cDNA shown in the sequence listing), or to a complementary stretch of T (or U) residues, would not be included in the definition of “polynucleotide,” since such a polynucleotide would hybridize to any nucleic acid molecule containing a poly (A) stretch or the complement thereof (e.g., practically any double-stranded cDNA clone generated using oligo dT as a primer).

[0065] The polynucleotide of the present invention can be composed of any polyribonucleotide or polydeoxribonucleotide, which may be unmodified RNA or DNA or modified RNA or DNA. For example, polynucleotides can be composed of single- and double-stranded DNA, DNA that is a mixture of single- and double-stranded regions, single- and double-stranded RNA, and RNA that is mixture of single- and double-stranded regions, hybrid molecules comprising DNA and RNA that may be single-stranded or, more typically, double-stranded or a mixture of single- and double-stranded regions. In addition, the polynucleotide can be composed of triple-stranded regions comprising RNA or DNA or both RNA and DNA. A polynucleotide may also contain one or more modified bases or DNA or RNA backbones modified for stability or for other reasons. “Modified” bases include, for example, tritylated bases and unusual bases such as inosine. A variety of modifications can be made to DNA and RNA; thus, “polynucleotide” embraces chemically, enzymatically, or metabolically modified forms.

[0066] In specific embodiments, the polynucleotides of the invention are at least 15, at least 30, at least 50, at least 100, at least 125, at least 500, or at least 1000 continuous nucleotides but are less than or equal to 300 kb, 200 kb, 100 kb, 50 kb, 15 kb, 10 kb, 7.5 kb, 5 kb, 2.5 kb, 2.0 kb, or 1 kb, in length. In a further embodiment, polynucleotides of the invention comprise a portion of the coding sequences, as disclosed herein, but do not comprise all or a portion of any intron. In another embodiment, the polynucleotides comprising coding sequences do not contain coding sequences of a genomic flanking gene (i.e., 5′ or 3′ to the gene of interest in the genome). In other embodiments, the polynucleotides of the invention do not contain the coding sequence of more than 1000, 500, 250, 100, 50, 25, 20, 15, 10, 5, 4, 3, 2, or 1 genomic flanking gene(s).

[0067] “SEQ ID NO:X” refers to a polynucleotide sequence described in column 5 of Table 1A, while “SEQ ID NO:Y” refers to a polypeptide sequence described in column 10 of Table 1A. SEQ ID NO:X is identified by an integer specified in column 6 of Table 1A. The polypeptide sequence SEQ ID NO:Y is a translated open reading frame (ORF) encoded by polynucleotide SEQ ID NO:X. The polynucleotide sequences are shown in the sequence listing immediately followed by all of the polypeptide sequences. Thus, a polypeptide sequence corresponding to polynucleotide sequence SEQ ID NO:2 is the first polypeptide sequence shown in the sequence listing. The second polypeptide sequence corresponds to the polynucleotide sequence shown as SEQ ID NO:3, and so on.

[0068] The polypeptide of the present invention can be composed of amino acids joined to each other by peptide bonds or modified peptide bonds, i.e., peptide isosteres, and may contain amino acids other than the 20 gene-encoded amino acids. The polypeptides may be modified by either natural processes, such as posttranslational processing, or by chemical modification techniques which are well known in the art. Such modifications are well described in basic texts and in more detailed monographs, as well as in a voluminous research literature. Modifications can occur anywhere in a polypeptide, including the peptide backbone, the amino acid side-chains and the amino or carboxyl termini. It will be appreciated that the same type of modification may be present in the same or varying degrees at several sites in a given polypeptide. Also, a given polypeptide may contain many types of modifications. Polypeptides may be branched, for example, as a result of ubiquitination, and they may be cyclic, with or without branching. Cyclic, branched, and branched cyclic polypeptides may result from posttranslation natural processes or may be made by synthetic methods. Modifications include acetylation, acylation, ADP-ribosylation, amidation, covalent attachment of flavin, covalent attachment of a heme moiety, covalent attachment of a nucleotide or nucleotide derivative, covalent attachment of a lipid or lipid derivative, covalent attachment of phosphotidylinositol, cross-linking, cyclization, disulfide bond formation, demethylation, formation of covalent cross-links, formation of cysteine, formation of pyroglutamate, formylation, gamma-carboxylation, glycosylation, GPI anchor formation, hydroxylation, iodination, methylation, myristoylation, oxidation, pegylation, proteolytic processing, phosphorylation, prenylation, racemization, selenoylation, sulfation, transfer-RNA mediated addition of amino acids to proteins such as arginylation, and ubiquitination. (See, for instance, PROTEINS—STRUCTURE AND MOLECULAR PROPERTIES, 2nd Ed., T. E. Creighton, W. H. Freeman and Company, New York (1993); POSTTRANSLATIONAL COVALENT MODIFICATION OF PROTEINS, B. C. Johnson, Ed., Academic Press, New York, pgs. 1-12 (1983); Seifter et al., Meth. Enzymol. 182:626-646 (1990); Rattan et al., Ann. N.Y. Acad. Sci. 663:48-62 (1992)).

[0069] “SEQ ID NO:X” refers to a polynucleotide sequence described, for example, in Tables 1A, Table 1B, or Table 2, while “SEQ ID NO:Y” refers to a polypeptide sequence described in column 11 of Table 1A and or Table 1B. SEQ ID NO:X is identified by an integer specified in column 4 of Table 1B. The polypeptide sequence SEQ ID NO:Y is a translated open reading frame (ORF) encoded by polynucleotide SEQ ID NO:X. “Clone ID:” refers to a cDNA clone described in column 2 of Table 1A and/or 1B.

[0070] “A polypeptide having functional activity” refers to a polypeptide capable of displaying one or more known functional activities associated with a full-length (complete) protein. Such functional activities include, but are not limited to, biological activity (e.g. activity useful in treating, preventing and/or ameliorating allergic and/or asthmatic diseases and disorders), antigenicity (ability to bind [or compete with a polypeptide for binding] to an anti-polypeptide antibody), immunogenicity (ability to generate antibody which binds to a specific polypeptide of the invention), ability to form multimers with polypeptides of the invention, and ability to bind to a receptor or ligand for a polypeptide.

[0071] The polypeptides of the invention can be assayed for functional activity (e.g. biological activity) using or routinely modifying assays known in the art, as well as assays described herein. Specifically, one of skill in the art may routinely assay secreted polypeptides (including fragments and variants) of the invention for activity using assays as described in the examples section below.

[0072] “A polypeptide having biological activity” refers to a polypeptide exhibiting activity similar to, but not necessarily identical to, an activity of a polypeptide of the present invention, including mature forms, as measured in a particular biological assay, with or without dose dependency. In the case where dose dependency does exist, it need not be identical to that of the polypeptide, but rather substantially similar to the dose-dependence in a given activity as compared to the polypeptide of the present invention (i.e., the candidate polypeptide will exhibit greater activity or not more than about 25-fold less and, preferably, not more than about tenfold less activity, and most preferably, not more than about three-fold less activity relative to the polypeptide of the present invention).

Tables

[0073] Table 1A Table 1A summarizes information concerning certain polypnucleotides and polypeptides of the invention. The first column provides the gene number in the application for each clone identifier. The second column provides a unique clone identifier, “Clone ID:”, for a cDNA clone related to each contig sequence disclosed in Table 1A. Third column, the cDNA Clones identified in the second column were deposited as indicated in the third column (i.e. by ATCC Deposit No: Z and deposit date). Some of the deposits contain multiple different clones corresponding to the same gene. In the fourth column, “Vector” refers to the type of vector contained in the corresponding cDNA Clone identified in the second column. In the fifth column, the nucleotide sequence identified as “NT SEQ ID NO:X” was assembled from partially homologous (“overlapping”) sequences obtained from the corresponding cDNA clone identified in the second column and, in some cases, from additional related cDNA clones. The overlapping sequences were assembled into a single contiguous sequence of high redundancy (usually three to five overlapping sequences at each nucleotide position), resulting in a final sequence identified as SEQ ID NO:X. In the sixth column, “Total NT Seq.” refers to the total number of nucleotides in the contig sequence identified as SEQ ID NO:X.” The deposited clone may contain all or most of these sequences, reflected by the nucleotide position indicated as “5′ NT of Clone Seq.” (seventh column) and the “3′ NT of Clone Seq.” (eighth column) of SEQ ID NO:X. In the ninth column, the nucleotide position of SEQ ID NO:X of the putative start codon (methionine) is identified as “5′ NT of Start Codon.” Similarly, in column ten, the nucleotide position of SEQ ID NO:X of the predicted signal sequence is identified as “5′ NT of First AA of Signal Pep.” In the eleventh column, the translated amino acid sequence, beginning with the methionine, is identified as “AA SEQ ID NO:Y,” although other reading frames can also be routinely translated using known molecular biology techniques. The polypeptides produced by these alternative open reading frames are specifically contemplated by the present invention.

[0074] In the twelfth and thirteenth columns of Table 1A, the first and last amino acid position of SEQ ID NO:Y of the predicted signal peptide is identified as “First AA of Sig Pep” and “Last AA of Sig Pep.” In the fourteenth column, the predicted first amino acid position of SEQ ID NO:Y of the secreted portion is identified as “Predicted First AA of Secreted Portion”. The amino acid position of SEQ ID NO:Y of the last amino acid encoded by the open reading frame is identified in the fifteenth column as “Last AA of ORF”.

[0075] SEQ ID NO:X (where X may be any of the polynucleotide sequences disclosed in the sequence listing) and the translated SEQ ID NO:Y (where Y may be any of the polypeptide sequences disclosed in the sequence listing) are sufficiently accurate and otherwise suitable for a variety of uses well known in the art and described further below. For instance, SEQ ID NO:X is useful for designing nucleic acid hybridization probes that will detect nucleic acid sequences contained in SEQ ID NO:X or the cDNA contained in the deposited clone. These probes will also hybridize to nucleic acid molecules in biological samples, thereby enabling a variety of forensic and diagnostic methods of the invention. Similarly, polypeptides identified from SEQ ID NO:Y may be used, for example, to generate antibodies which bind specifically to proteins containing the polypeptides and the secreted proteins encoded by the cDNA clones identified in Table 1A and/or elsewhere herein

[0076] Nevertheless, DNA sequences generated by sequencing reactions can contain sequencing errors. The errors exist as misidentified nucleotides, or as insertions or deletions of nucleotides in the generated DNA sequence. The erroneously inserted or deleted nucleotides cause frame shifts in the reading frames of the predicted amino acid sequence. In these cases, the predicted amino acid sequence diverges from the actual amino acid sequence, even though the generated DNA sequence may be greater than 99.9% identical to the actual DNA sequence (for example, one base insertion or deletion in an open reading frame of over 1000 bases).

[0077] Accordingly, for those applications requiring precision in the nucleotide sequence or the amino acid sequence, the present invention provides not only the generated nucleotide sequence identified as SEQ ID NO:X, and the predicted translated amino acid sequence identified as SEQ ID NO:Y, but also a sample of plasmid DNA containing a human cDNA of the invention deposited with the ATCC, as set forth in Table 1A. The nucleotide sequence of each deposited plasmid can readily be determined by sequencing the deposited plasmid in accordance with known methods

[0078] The predicted amino acid sequence can then be verified from such deposits. Moreover, the amino acid sequence of the protein encoded by a particular plasmid can also be directly determined by peptide sequencing or by expressing the protein in a suitable host cell containing the deposited human cDNA, collecting the protein, and determining its sequence.

[0079] Also provided in Table 1A is the name of the vector which contains the cDNA plasmid. Each vector is routinely used in the art. The following additional information is provided for convenience.

[0080] Vectors Lambda Zap (U.S. Pat. Nos. 5,128,256 and 5,286,636), Uni-Zap XR (U.S. Pat. Nos. 5,128,256 and 5,286,636), Zap Express (U.S. Pat. Nos. 5,128,256 and 5,286,636), pBluescript (pBS) (Short, J. M. et al., Nucleic Acids Res. 16:7583-7600 (1988); Alting-Mees, M. A. and Short, J. M., Nucleic Acids Res. 17:9494 (1989)) and pBK (Alting-Mees, M. A. et al., Strategies 5:58-61 (1992)) are commercially available from Stratagene Cloning Systems, Inc., 11011 N. Torrey Pines Road, La Jolla, Calif., 92037. pBS contains an ampicillin resistance gene and pBK contains a neomycin resistance gene. Phagemid pBS may be excised from the Lambda Zap and Uni-Zap XR vectors, and phagemid pBK may be excised from the Zap Express vector. Both phagemids may be transformed into E. coli strain XL-1 Blue, also available from Stratagene

[0081] Vectors pSport1, pCMVSport 1.0, pCMVSport 2.0 and pCMVSport 3.0, were obtained from Life Technologies, Inc., P.O. Box 6009, Gaithersburg, Md. 20897. All Sport vectors contain an ampicillin resistance gene and may be transformed into E. coli strain DH10B, also available from Life Technologies. See, for instance, Gruber, C. E., et al., Focus 15:59 (1993). Vector lafmid BA (Bento Soares, Columbia University, New York, N.Y.) contains an ampicillin resistance gene and can be transformed into E. coli strain XL-1 Blue. Vector pCR®2.1, which is available from Invitrogen, 1600 Faraday Avenue, Carlsbad, Calif. 92008, contains an ampicillin resistance gene and may be transformed into E. coli strain DH10B, available from Life Technologies. See, for instance, Clark, J. M., Nuc. Acids Res. 16:9677-9686 (1988) and Mead, D. et al., Bio/Technology 9: (1991).

[0082] The present invention also relates to the genes corresponding to SEQ ID NO:X, SEQ ID NO:Y, and/or a deposited cDNA (cDNA Clone ID). The corresponding gene can be isolated in accordance with known methods using the sequence information disclosed herein. Such methods include, but are not limited to, preparing probes or primers from the disclosed sequence and identifying or amplifying the corresponding gene from appropriate sources of genomic material.

[0083] Also provided in the present invention are allelic variants, orthologs, and/or species homologs. Procedures known in the art can be used to obtain full-length genes, allelic variants, splice variants, full-length coding portions, orthologs, and/or species homologs of genes corresponding to SEQ ID NO:X and SEQ ID NO:Y using information from the sequences disclosed herein or the clones deposited with the ATCC. For example, allelic variants and/or species homologs may be isolated and identified by making suitable probes or primers from the sequences provided herein and screening a suitable nucleic acid source for allelic variants and/or the desired homologue.

[0084] The present invention provides a polynucleotide comprising, or alternatively consisting of, the nucleic acid sequence of SEQ ID NO:X and/or a cDNA contained in ATCC Deposit No. Z. The present invention also provides a polypeptide comprising, or alternatively, consisting of, the polypeptide sequence of SEQ ID NO:Y, a polypeptide encoded by SEQ ID NO:X, and/or a polypeptide encoded by a cDNA contained in ATCC deposit No. Z. Polynucleotides encoding a polypeptide comprising, or alternatively consisting of the polypeptide sequence of SEQ ID NO:Y, a polypeptide encoded by SEQ ID NO:X and/or a polypeptide encoded by the cDNA contained in ATCC Deposit No. Z, are also encompassed by the invention. The present invention further encompasses a polynucleotide comprising, or alternatively consisting of the complement of the nucleic acid sequence of SEQ ID NO:X, and/or the complement of the coding strand of the cDNA contained in ATCC Deposit No. Z.

TABLE 1A

| | | | | | | | | | 5′ NT | | First | Last | | |
|---|---|---|---|---|---|---|---|---|---|---|---|---|---|---|
| | | ATCC | | NT | | 5′ NT | 3′ NT | | of First | AA | AA | AA | First AA | Last |
| | | Deposit | | SEQ | Total | of | of | 5′ NT | AA of | SEQ | of | of | of | AA |
| | cDNA | No: Z and | | ID | NT | Clone | Clone | of Start | Signal | ID | Sig | Sig | Secreted | of |
| Gene No. | Clone ID | Date | Vector | NO: X | Seq. | Seq. | Seq. | Codon | Pep | NO: Y | Pep | Pep | Portion | ORF |
| 1 | HACBT91 | 203917 | Uni-ZAP XR | 11 | 841 | 1 | 841 | | 329 | 116 | 1 | 7 | 8 | 59 |
| | | Apr. 08, 1999 | | | | | | | | | | | | |
| 2 | HADDE71 | 203917 | pSport1 | 12 | 667 | 1 | 667 | 250 | 250 | 117 | 1 | 28 | 29 | 139 |
| | | Apr. 08, 1999 | | | | | | | | | | | | |
| 3 | HADDJ13 | 203917 | pSport1 | 13 | 2318 | 1 | 2318 | 347 | 347 | 118 | 1 | 20 | 21 | 30 |
| | | Apr. 08, 1999 | | | | | | | | | | | | |
| 4 | HADMA77 | 203917 | pBluescript | 14 | 1913 | 763 | 1913 | | 992 | 119 | 1 | 14 | 15 | 23 |
| | | Apr. 08, 1999 | | | | | | | | | | | | |
| 5 | HADMB15 | 203979 | pBluescript | 15 | 330 | 1 | 330 | | 238 | 120 | 1 | 11 | 12 | 20 |
| | | Apr. 29, 1999 | | | | | | | | | | | | |
| 6 | HAGBQ12 | 203917 | Uni-ZAP XR | 16 | 743 | 1 | 743 | 171 | 171 | 121 | 1 | 19 | 20 | 21 |
| | | Apr. 08, 1999 | | | | | | | | | | | | |
| 7 | HAGCC87 | 203917 | Uni-ZAP XR | 17 | 1592 | 479 | 1592 | 509 | 509 | 122 | 1 | | | 9 |
| | | Apr. 08, 1999 | | | | | | | | | | | | |
| 8 | HAGHN57 | 203917 | Uni-ZAP XR | 18 | 2440 | 843 | 2440 | 900 | 900 | 123 | 1 | | | 10 |
| | | Apr. 08, 1999 | | | | | | | | | | | | |
| 9 | HAGHR18 | 203917 | Uni-ZAP XR | 19 | 1142 | 1 | 1142 | 28 | 28 | 124 | 1 | 17 | 18 | 32 |
| | | Apr. 08, 1999 | | | | | | | | | | | | |
| 10 | HAQAI92 | 203917 | Uni-ZAP XR | 20 | 607 | 1 | 602 | 250 | 250 | 125 | 1 | 15 | 16 | 23 |
| | | Apr. 08, 1999 | | | | | | | | | | | | |
| 11 | HAQBG57 | 203917 | Uni-ZAP XR | 21 | 1048 | 1 | 1031 | | 170 | 126 | 1 | 15 | 16 | 56 |
| | | Apr. 08, 1999 | | | | | | | | | | | | |
| 12 | HAQCE11 | 203917 | Uni-ZAP XR | 22 | 596 | 1 | 596 | | 262 | 127 | 1 | | | 3 |
| | | Apr. 08, 1999 | | | | | | | | | | | | |
| 13 | HBAGD86 | 203917 | pSport1 | 23 | 1713 | 293 | 1596 | 521 | 521 | 128 | 1 | 18 | 19 | 19 |
| | | Apr. 08, 1999 | | | | | | | | | | | | |
| 14 | HBGBC29 | 203917 | Uni-ZAP XR | 24 | 1856 | 764 | 1829 | | 1016 | 129 | 1 | | | 2 |
| | | Apr. 08, 1999 | | | | | | | | | | | | |
| 15 | HBJAB02 | 203917 | Uni-ZAP XR | 25 | 1693 | 1 | 1665 | 84 | 84 | 130 | 1 | 27 | 28 | 34 |
| | | Apr. 08, 1999 | | | | | | | | | | | | |
| 16 | HBMUH74 | PTA-181 | Uni-ZAP XR | 26 | 726 | 1 | 726 | 344 | 344 | 131 | 1 | 13 | 14 | 28 |
| | | Jun. 07, 1999 | | | | | | | | | | | | |
| 17 | HBNAX40 | 203917 | Uni-ZAP XR | 27 | 2793 | 2455 | 2793 | 2497 | 2497 | 132 | 1 | 18 | 19 | 49 |
| | | Apr. 08, 1999 | | | | | | | | | | | | |
| 18 | HBXCX15 | 203917 | ZAP Express | 28 | 1219 | 1 | 1219 | | 1148 | 133 | 1 | | | 1 |
| | | Apr. 08, 1999 | | | | | | | | | | | | |
| 19 | HCDBO32 | 203917 | Uni-ZAP XR | 29 | 2630 | 1480 | 2630 | 1669 | 1669 | 134 | 1 | 25 | 26 | 71 |
| | | Apr. 08, 1999 | | | | | | | | | | | | |
| 20 | HCEEE79 | 203917 | Uni-ZAP XR | 30 | 1052 | 1 | 1052 | 131 | 131 | 135 | 1 | 15 | 16 | 55 |
| | | Apr. 08, 1999 | | | | | | | | | | | | |
| 21 | HCEFZ82 | 203917 | Uni-ZAP XR | 31 | 1811 | 44 | 1781 | 215 | 215 | 136 | 1 | 16 | 17 | 265 |
| | | Apr. 08, 1999 | | | | | | | | | | | | |
| 22 | HCUCF89 | 203917 | ZAP Express | 32 | 530 | 1 | 530 | 189 | 189 | 137 | 1 | 18 | 19 | 29 |
| | | Apr. 08, 1999 | | | | | | | | | | | | |
| 23 | HCWAE64 | 203917 | ZAP Express | 33 | 471 | 1 | 471 | | 410 | 138 | 1 | | | 5 |
| | | Apr. 08, 1999 | | | | | | | | | | | | |
| 24 | HCWUL09 | 203917 | ZAP Express | 34 | 761 | 3 | 761 | 333 | 333 | 139 | 1 | | | 11 |
| | | Apr. 08, 1999 | | | | | | | | | | | | |
| 25 | HDPDI72 | PTA-794 | pCMVSport | 35 | 1550 | 1 | 1550 | 23 | 23 | 140 | 1 | 17 | 18 | 120 |
| | | Sep. 27, 1999 | 3.0 | | | | | | | | | | | |
| 26 | HDPFY18 | 203918 | pCMVSport | 36 | 2187 | 1 | 2187 | 161 | 161 | 141 | 1 | | | 7 |
| | | Apr. 08, 1999 | 3.0 | | | | | | | | | | | |
| 27 | HDPIE44 | PTA-794 | pCMVSport | 37 | 4115 | 1 | 4115 | 169 | 169 | 142 | 1 | 35 | 36 | 60 |
| | | Sep. 27, 1999 | 3.0 | | | | | | | | | | | |
| 28 | HDPIU94 | 203960 | pCMVSport | 38 | 2196 | 21 | 2196 | 208 | 208 | 143 | 1 | 21 | 22 | 23 |
| | | Apr. 26, 1999 | 3.0 | | | | | | | | | | | |
| 29 | HDPPD93 | 203960 | pCMVSport | 39 | 701 | 1 | 701 | 28 | 28 | 144 | 1 | | | 12 |
| | | Apr. 26, 1999 | 3.0 | | | | | | | | | | | |
| 30 | HDTLM18 | 203960 | pCMVSport | 40 | 525 | 1 | 525 | 345 | 345 | 145 | 1 | 18 | 19 | 60 |
| | | Apr. 26, 1999 | 2.0 | | | | | | | | | | | |
| 31 | HE6CS65 | 203960 | Uni-ZAP XR | 41 | 1526 | 1 | 1526 | | 295 | 146 | 1 | 10 | 11 | 62 |
| | | Apr. 26, 1999 | | | | | | | | | | | | |
| 32 | HE8BQ49 | 203960 | Uni-ZAP XR | 42 | 1875 | 12 | 1875 | 133 | 133 | 147 | 1 | | | 11 |
| | | Apr. 26, 1999 | | | | | | | | | | | | |
| 33 | HE9CY05 | 203960 | Uni-ZAP XR | 43 | 1047 | 47 | 1047 | 55 | 55 | 148 | 1 | 21 | 22 | 235 |
| | | Apr. 26, 1999 | | | | | | | | | | | | |
| 34 | HEAAW94 | 203979 | Uni-ZAP XR | 44 | 924 | 1 | 924 | 189 | 189 | 149 | 1 | | | 11 |
| | | Apr. 29, 1999 | | | | | | | | | | | | |
| 35 | HEBFR46 | 203979 | Uni-ZAP XR | 45 | 1304 | 1 | 1304 | 200 | 200 | 150 | 1 | 26 | 27 | 29 |
| | | Apr. 29, 1999 | | | | | | | | | | | | |
| 36 | HEOMC46 | PTA-181 | pSport1 | 46 | 939 | 1 | 939 | | 154 | 151 | 1 | 40 | 41 | 51 |
| | | Jun. 07, 1999 | | | | | | | | | | | | |
| 37 | HFCDW95 | 203979 | Uni-ZAP XR | 47 | 871 | 1 | 871 | | 151 | 152 | 1 | | | 2 |
| | | Apr. 29, 1999 | | | | | | | | | | | | |
| 38 | HFEBO17 | PTA-181 | Uni-ZAP XR | 48 | 990 | 1 | 990 | 136 | 136 | 153 | 1 | 17 | 18 | 27 |
| | | Jun. 07, 1999 | | | | | | | | | | | | |
| 39 | HFIJA29 | 203969 | pSport1 | 49 | 1275 | 110 | 1275 | 175 | 175 | 154 | 1 | 27 | 28 | 82 |
| | | Apr. 26, 1999 | | | | | | | | | | | | |
| 40 | HFKFX64 | 203960 | Uni-ZAP XR | 50 | 779 | 1 | 779 | 127 | 127 | 155 | 1 | | | 14 |
| | | Apr. 26, 1999 | | | | | | | | | | | | |
| 41 | HGBER72 | 203960 | Uni-ZAP XR | 51 | 1316 | 1 | 1316 | 43 | 43 | 156 | 1 | 16 | 17 | 19 |
| | | Apr. 26, 1999 | | | | | | | | | | | | |
| 42 | HGBGN34 | 203960 | Uni-ZAP XR | 52 | 528 | 1 | 528 | | 280 | 157 | 1 | 32 | 33 | 48 |
| | | Apr. 26, 1999 | | | | | | | | | | | | |
| 43 | HGLBG15 | 203960 | Uni-ZAP XR | 53 | 778 | 1 | 778 | | 191 | 158 | 1 | | | 26 |
| | | Apr. 26, 1999 | | | | | | | | | | | | |
| 44 | HHFEC39 | 203960 | Uni-ZAP XR | 54 | 1302 | 1 | 1302 | | 1211 | 159 | 1 | | | 1 |
| | | Apr. 26, 1999 | | | | | | | | | | | | |
| 45 | HHSDI53 | PTA-181 | Uni-ZAP XR | 55 | 1277 | 1 | 1277 | 221 | 221 | 160 | 1 | 14 | 15 | 24 |
| | | Jun. 07, 1999 | | | | | | | | | | | | |
| 46 | HISBA38 | 203957 | pSport1 | 56 | 1058 | 1 | 1058 | 169 | 169 | 161 | 1 | 32 | 33 | 36 |
| | | Apr. 26, 1999 | | | | | | | | | | | | |
| 47 | HJPBK28 | 203957 | Uni-ZAP XR | 57 | 989 | 1 | 989 | | 256 | 162 | 1 | 21 | 22 | 43 |
| | | Apr. 26, 1999 | | | | | | | | | | | | |
| 48 | HKABU43 | 203959 | pCMVSport | 58 | 1919 | 581 | 1919 | 755 | 755 | 163 | 1 | 20 | 21 | 281 |
| | | Apr. 26, 1999 | 2.0 | | | | | | | | | | | |
| 49 | HLYGE16 | 203957 | pSport1 | 59 | 752 | 1 | 752 | 406 | 406 | 164 | 1 | 17 | 18 | 73 |
| | | Apr. 26, 1999 | | | | | | | | | | | | |
| 50 | HLYGY91 | 203957 | pSport1 | 60 | 640 | 1 | 640 | 211 | 211 | 165 | 1 | 20 | 21 | 42 |
| | | Apr. 26, 1999 | | | | | | | | | | | | |
| 51 | HMCFH60 | 203957 | Uni-ZAP XR | 61 | 443 | 1 | 443 | 211 | 211 | 166 | 1 | 17 | 18 | 48 |
| | | Apr. 26, 1999 | | | | | | | | | | | | |
| 52 | HMIAK10 | 203957 | Uni-ZAP XR | 62 | 1064 | 1 | 1064 | 195 | 195 | 167 | 1 | 22 | 23 | 31 |
| | | Apr. 26, 1999 | | | | | | | | | | | | |
| 53 | HMIBD93 | 203957 | Uni-ZAP XR | 63 | 1323 | 734 | 1323 | | 983 | 168 | 1 | 27 | 28 | 65 |
| | | Apr. 26, 1999 | | | | | | | | | | | | |
| 54 | HMWJF53 | 203957 | Uni-ZAP XR | 64 | 2288 | 927 | 2101 | 1015 | 1015 | 169 | 1 | 30 | 31 | 38 |
| | | Apr. 26, 1999 | | | | | | | | | | | | |
| 55 | HNECL22 | 203957 | Uni-ZAP XR | 65 | 2710 | 225 | 2710 | 472 | 472 | 170 | 1 | 23 | 24 | 34 |
| | | Apr. 26, 1999 | | | | | | | | | | | | |
| 56 | HNFAC50 | 203957 | Uni-ZAP XR | 66 | 1442 | 428 | 1442 | 676 | 676 | 171 | 1 | 22 | 23 | 32 |
| | | Apr. 26, 1999 | | | | | | | | | | | | |
| 57 | HNGEA34 | 203957 | Uni-ZAP XR | 67 | 1103 | 1 | 1103 | | 58 | 172 | 1 | 24 | 25 | 44 |
| | | Apr. 26, 1999 | | | | | | | | | | | | |
| 58 | HNGIV64 | 203957 | Uni-ZAP XR | 68 | 1047 | 1 | 1047 | | 221 | 173 | 1 | | | 8 |
| | | Apr. 26, 1999 | | | | | | | | | | | | |
| 59 | HNGKT41 | 203959 | Uni-ZAP XR | 69 | 1048 | 1 | 1048 | 415 | 415 | 174 | 1 | 17 | 18 | 45 |
| | | Apr. 26, 1999 | | | | | | | | | | | | |
| 60 | HNGNO53 | 203959 | Uni-ZAP XR | 70 | 825 | 1 | 825 | 467 | 467 | 175 | 1 | 15 | 16 | 34 |
| | | Apr. 26, 1999 | | | | | | | | | | | | |
| 61 | HNHCT47 | 203959 | Uni-ZAP XR | 71 | 621 | 12 | 621 | 73 | 73 | 176 | 1 | 20 | 21 | 39 |
| | | Apr. 26, 1999 | | | | | | | | | | | | |
| 62 | HNHKI74 | 203959 | Uni-ZAP XR | 72 | 817 | 1 | 817 | 127 | 127 | 177 | 1 | | | 10 |
| | | Apr. 26, 1999 | | | | | | | | | | | | |
| 63 | HORBS82 | 203959 | Uni-ZAP XR | 73 | 1125 | 1 | 1125 | | 21 | 178 | 1 | 19 | 20 | 39 |
| | | Apr. 26, 1999 | | | | | | | | | | | | |
| 64 | HOUDE92 | 203918 | Uni-ZAP XR | 74 | 1284 | 1 | 1282 | | 70 | 179 | 1 | 6 | 7 | 88 |
| | | Apr. 08, 1999 | | | | | | | | | | | | |
| 65 | HOUFS04 | 203959 | Uni-ZAP XR | 75 | 2927 | 457 | 2882 | 520 | 520 | 180 | 1 | 42 | 43 | 72 |
| | | Apr. 26, 1999 | | | | | | | | | | | | |
| 66 | HOUHI25 | PTA-793 | Uni-ZAP XR | 76 | 1249 | 45 | 1102 | 188 | 188 | 181 | 1 | | | 20 |
| | | Sep. 27, 1999 | | | | | | | | | | | | |
| 67 | HPCAL26 | 203917 | Uni-ZAP XR | 77 | 3097 | 803 | 3097 | 1021 | 1021 | 182 | 1 | 23 | 24 | 30 |
| | | Apr. 08, 1999 | | | | | | | | | | | | |
| 68 | HPEBA84 | 203959 | Uni-ZAP XR | 78 | 1160 | 250 | 1160 | 533 | 533 | 183 | 1 | 21 | 22 | 36 |
| | | Apr. 26, 1999 | | | | | | | | | | | | |
| 69 | HSAVA08 | 203918 | Uni-ZAP XR | 79 | 1061 | 1 | 1061 | | 66 | 184 | 1 | 17 | 18 | 26 |
| | | Apr. 08, 1999 | | | | | | | | | | | | |
| 70 | HSHAX04 | 203959 | Uni-ZAP XR | 80 | 1287 | 494 | 1285 | | 42 | 185 | 1 | 6 | 7 | 57 |
| | | Apr. 26, 1999 | | | | | | | | | | | | |
| 71 | HSKDR27 | 203918 | Uni-ZAP XR | 81 | 762 | 1 | 762 | | 473 | 186 | 1 | 11 | 12 | 27 |
| | | Apr. 08, 1999 | | | | | | | | | | | | |
| 72 | HSQBF66 | 203918 | Uni-ZAP XR | 82 | 1024 | 1 | 1024 | | 229 | 187 | 1 | 28 | 29 | 66 |
| | | Apr. 08, 1999 | | | | | | | | | | | | |
| 73 | HSRFD18 | 203959 | Uni-ZAP XR | 83 | 1889 | 1 | 1793 | 67 | 67 | 188 | 1 | 20 | 21 | 28 |
| | | Apr. 26, 1999 | | | | | | | | | | | | |
| 74 | HSWBE76 | 203959 | pCMVSport | 84 | 874 | 250 | 710 | 380 | 380 | 189 | 1 | 34 | 35 | 59 |
| | | Apr. 26, 1999 | 3.0 | | | | | | | | | | | |
| 75 | HT3BF49 | 203959 | Uni-ZAP XR | 85 | 2174 | 1 | 2174 | | 306 | 190 | 1 | | | 4 |
| | | Apr. 26, 1999 | | | | | | | | | | | | |
| 76 | HTEEW69 | 203959 | Uni-ZAP XR | 86 | 1282 | 110 | 1263 | 182 | 182 | 191 | 1 | 30 | 31 | 323 |
| | | Apr. 26, 1999 | | | | | | | | | | | | |
| 77 | HTEHU59 | 203959 | Uni-ZAP XR | 87 | 1523 | 1 | 1504 | 170 | 170 | 192 | 1 | 19 | 20 | 34 |
| | | Apr. 26, 1999 | | | | | | | | | | | | |
| 78 | HTEMQ17 | 203959 | Uni-ZAP XR | 88 | 1768 | 1 | 1768 | 446 | 446 | 193 | 1 | | | 12 |
| | | Apr. 26, 1999 | | | | | | | | | | | | |
| 79 | HTGBK95 | 203959 | Uni-ZAP XR | 89 | 1131 | 1 | 1131 | 271 | 271 | 194 | 1 | 12 | 13 | 16 |
| | | Apr. 26, 1999 | | | | | | | | | | | | |
| 80 | HTLEM16 | 203959 | Uni-ZAP XR | 90 | 1915 | 1158 | 1755 | 1220 | 1220 | 195 | 1 | 27 | 28 | 69 |
| | | Apr. 26, 1999 | | | | | | | | | | | | |
| 81 | HTNBK13 | 203959 | pBluescript | 91 | 1160 | 295 | 1148 | 534 | 534 | 196 | 1 | 16 | 17 | 21 |
| | | Apr. 26, 1999 | SK− | | | | | | | | | | | |
| 82 | HTODN35 | 203918 | Uni-ZAP XR | 92 | 1594 | 1 | 1594 | 67 | 67 | 197 | 1 | | | 14 |
| | | Apr. 08, 1999 | | | | | | | | | | | | |
| 83 | HTPDU17 | 203959 | Uni-ZAP XR | 93 | 2078 | 1 | 2078 | | 52 | 198 | 1 | 17 | 18 | 33 |
| | | Apr. 26, 1999 | | | | | | | | | | | | |
| 84 | HTTDN24 | 203959 | Uni-ZAP XR | 94 | 1992 | 856 | 1992 | | 1024 | 199 | 1 | 13 | 14 | 234 |
| | | Apr. 26, 1999 | | | | | | | | | | | | |
| 85 | HTTEE41 | 203959 | Uni-ZAP XR | 95 | 1973 | 864 | 1968 | | 1171 | 200 | 1 | | | 8 |
| | | Apr. 26, 1999 | | | | | | | | | | | | |
| 86 | HTXJD85 | 203959 | Uni-ZAP XR | 96 | 1117 | 1 | 1117 | 211 | 211 | 201 | 1 | 16 | 17 | 31 |
| | | Apr. 26, 1999 | | | | | | | | | | | | |
| 87 | HUVDJ48 | 203918 | Uni-ZAP XR | 97 | 1827 | 1 | 1827 | 196 | 196 | 202 | 1 | | | 5 |
| | | Apr. 08, 1999 | | | | | | | | | | | | |
| 88 | HWBBU75 | 203979 | pCMVSport | 98 | 2731 | 623 | 2731 | 783 | 783 | 203 | 1 | 22 | 23 | 51 |
| | | Apr. 29, 1999 | 3.0 | | | | | | | | | | | |
| 89 | HWHPB78 | 203959 | pCMVSport | 99 | 1346 | 1 | 1346 | 200 | 200 | 204 | 1 | 23 | 24 | 66 |
| | | Apr. 26, 1999 | 3.0 | | | | | | | | | | | |
| 90 | HWLBO67 | 203959 | pSport1 | 100 | 536 | 1 | 536 | 42 | 42 | 205 | 1 | 28 | 29 | 39 |
| | | Apr. 26, 1999 | | | | | | | | | | | | |
| 91 | HWLGP26 | 203959 | pSport1 | 101 | 1898 | 1007 | 1835 | 1091 | 1091 | 206 | 1 | 23 | 24 | 71 |
| | | Apr. 26, 1999 | | | | | | | | | | | | |
| 92 | HILCA24 | 203960 | pBluescript | 102 | 1982 | 153 | 1982 | 191 | 191 | 207 | 1 | 29 | 30 | 327 |
| | | Apr. 26, 1999 | SK− | | | | | | | | | | | |
| 92 | HILCA24 | 203960 | pBluescript | 108 | 1980 | 151 | 1976 | 189 | 189 | 213 | 1 | 29 | 30 | 327 |
| | | Apr. 26, 1999 | SK− | | | | | | | | | | | |
| 93 | HE2CA60 | 203960 | Uni-ZAP XR | 103 | 3034 | 1679 | 3034 | 1731 | 1731 | 208 | 1 | | | 7 |
| | | Apr. 26, 1999 | | | | | | | | | | | | |
| 93 | HE2CA60 | 203960 | Uni-ZAP XR | 109 | 1663 | 308 | 1663 | 360 | 360 | 214 | 1 | | | 7 |
| | | Apr. 26, 1999 | | | | | | | | | | | | |
| 94 | HPWTF23 | 203979 | Uni-ZAP XR | 104 | 2008 | 94 | 1994 | 283 | 283 | 209 | 1 | 29 | 30 | 130 |
| | | Apr. 29, 1999 | | | | | | | | | | | | |
| 94 | HPWTF23 | 203979 | Uni-ZAP XR | 110 | 2008 | 94 | 1994 | 283 | 283 | 215 | 1 | 29 | 30 | 130 |
| | | Apr. 29, 1999 | | | | | | | | | | | | |
| 95 | HGCAC19 | 203960 | pSport1 | 105 | 5061 | 23 | 1475 | | 317 | 210 | 1 | | | 9 |
| | | Apr. 26, 1999 | | | | | | | | | | | | |
| 95 | HGCAC19 | 203960 | pSport1 | 111 | 1771 | 21 | 1473 | | 315 | 216 | 1 | | | 9 |
| | | Apr. 26, 1999 | | | | | | | | | | | | |
| 95 | HGCAC19 | 203960 | pSport1 | 112 | 1534 | 23 | 1534 | | 317 | 217 | 1 | | | 9 |
| | | Apr. 26, 1999 | | | | | | | | | | | | |
| 96 | HEQBJ01 | 203960 | pCMVSport | 106 | 2791 | 2346 | 2731 | 2603 | 2603 | 211 | 1 | | | 19 |
| | | Apr. 26, 1999 | 3.0 | | | | | | | | | | | |
| 96 | HEQBJ01 | 203960 | pCMVSport | 113 | 2791 | 2346 | 2731 | 2603 | 2603 | 218 | 1 | | | 19 |
| | | Apr. 26, 1999 | 3.0 | | | | | | | | | | | |
| 96 | HEQBJ01 | 203960 | pCMVSport | 114 | 669 | 1 | 662 | 505 | 505 | 219 | 1 | | | 19 |
| | | Apr. 26, 1999 | 3.0 | | | | | | | | | | | |
| 97 | HBJHT01 | 203917 | Uni-ZAP XR | 107 | 1251 | 1 | 1251 | 200 | 200 | 212 | 1 | 20 | 21 | 21 |
| | | Apr. 08, 1999 | | | | | | | | | | | | |
| 97 | HBJHT01 | 203917 | Uni-ZAP XR | 115 | 1252 | 1 | 1252 | 193 | 193 | 220 | 1 | 21 | 22 | 47 |
| | | Apr. 08, 1999 | | | | | | | | | | | | |
| 98 | HAGDW20 | 203917 | Uni-ZAP XR | 108 | 1284 | 1 | 1284 | 238 | 238 | 215 | 1 | 16 | 17 | 17 |
| | | Apr. 08, 1999 | | | | | | | | | | | | |
| 99 | HTLIF11 | 203959 | Uni-ZAP XR | 109 | 1968 | 860 | 1968 | 933 | 933 | 216 | 1 | 33 | 34 | 38 |
| | | Apr. 26, 1999 | | | | | | | | | | | | |

Table 1B (Comprised of Tables 1B.1 and 1B.2)

[0085] The first column in Table 1B.1 and Table 1B.2 provides the gene number in the application corresponding to the clone identifier. The second column in Table 1B.1 and Table 1B.2 provides a unique “Clone ID:” for the cDNA clone related to each contig sequence disclosed in Table 1B.1 and Table 1B.2. This clone ID references the cDNA clone which contains at least the 5′ most sequence of the assembled contig and at least a portion of SEQ ID NO:X as determined by directly sequencing the referenced clone. The referenced clone may have more sequence than described in the sequence listing or the clone may have less. In the vast majority of cases, however, the clone is believed to encode a full-length polypeptide. In the case where a clone is not full-length, a full-length cDNA can be obtained by methods described elsewhere herein. The third column in Table 1B.1 and Table 1B.2 provides a unique “Contig ID” identification for each contig sequence. The fourth column in Table 1B.1 and Table 1B.2 provides the “SEQ ID NO:” identifier for each of the contig polynucleotide sequences disclosed in Table 1B.

[0086] Table 1B.1

[0087] The fifth column in Table 1B.1, “ORF (From-To)”, provides the location (i.e., nucleotide position numbers) within the polynucleotide sequence “SEQ ID NO:X” that delineate the preferred open reading frame (ORF) shown in the sequence listing and referenced in Table 1B.1, column 6, as SEQ ID NO:Y. Where the nucleotide position number “To” is lower than the nucleotide position number “From”, the preferred ORF is the reverse complement of the referenced polynucleotide sequence. The sixth column in Table 1B.1 provides the corresponding SEQ ID NO:Y for the polypeptide sequence encoded by the preferred ORF delineated in column 5. In one embodiment, the invention provides an amino acid sequence comprising, or alternatively consisting of, a polypeptide encoded by the portion of SEQ ID NO:X delineated by “ORF (From-To)”. Also provided are polynucleotides encoding such amino acid sequences and the complementary strand thereto. Column 7 in Table 1B.1 lists residues comprising epitopes contained in the polypeptides encoded by the preferred ORF (SEQ ID NO:Y), as predicted using the algorithm of Jameson and Wolf, (1988) Comp. Appl. Biosci. 4:181-186. The Jameson-Wolf antigenic analysis was performed using the computer program PROTEAN (Version 3.11 for the Power MacIntosh, DNASTAR, Inc., 1228 South Park Street Madison, Wis.). In specific embodiments, polypeptides of the invention comprise, or alternatively consist of, at least one, two, three, four, five or more of the predicted epitopes as described in Table 1B. It will be appreciated that depending on the analytical criteria used to predict antigenic determinants, the exact address of the determinant may vary slightly. Column 8 of Table 1B.1 (“Tissue Distribution”) is described below in Table 1B.2 Column 5. Column 9 of Table 1B.1 (“Cytologic Band”) provides the chromosomal location of polynucleotides corresponding to SEQ ID NO:X. Chromosomal location was determined by finding exact matches to EST and cDNA sequences contained in the NCBI (National Center for Biotechnology Information) UniGene database. Each sequence in the UniGene database is assigned to a “cluster”; all of the ESTs, cDNAs, and STSs in a cluster are believed to be derived from a single gene. Chromosomal mapping data is often available for one or more sequence(s) in a UniGene cluster; this data (if consistent) is then applied to the cluster as a whole. Thus, it is possible to infer the chromosomal location of a new polynucleotide sequence by determining its identity with a mapped UniGene cluster.

[0088] A modified version of the computer program BLASTN (Altshul, et al., J. Mol. Biol. 215:403-410 (1990), and Gish, and States, Nat. Genet. 3:266-272) (1993) was used to search the UniGene database for EST or cDNA sequences that contain exact or near-exact matches to a polynucleotide sequence of the invention (the ‘Query’). A sequence from the UniGene database (the ‘Subject’) was said to be an exact match if it contained a segment of 50 nucleotides in length such that 48 of those nucleotides were in the same order as found in the Query sequence. If all of the matches that met this criteria were in the same UniGene cluster, and mapping data was available for this cluster, it is indicated in Table 1B under the heading “Cytologic Band”. Where a cluster had been further localized to a distinct cytologic band, that band is disclosed; where no banding information was available, but the gene had been localized to a single chromosome, the chromosome is disclosed.

[0089] Once a presumptive chromosomal location was determined for a polynucleotide of the invention, an associated disease locus was identified by comparison with a database of diseases which have been experimentally associated with genetic loci. The database used was the Morbid Map, derived from OMIM™ and National Center for Biotechnology Information, National Library of Medicine (Bethesda, Md.) 2000. If the putative chromosomal location of a polynucleotide of the invention (Query sequence) was associated with a disease in the Morbid Map database, an OMIM reference identification number was noted in column 10, Table 1B.1, labelled “OMIM Disease Reference(s). Table 5 is a key to the OMIM reference identification numbers (column 1), and provides a description of the associated disease in Column 2.

[0090] Table 1B.2

[0091] Column 5, in Table 1B.2, provides an expression profile and library code: count for each of the contig sequences (SEQ ID NO:X) disclosed in Table 1B, which can routinely be combined with the information provided in Table 4 and used to determine the tissues, cells, and/or cell line libraries which predominantly express the polynucleotides of the invention. The first number in Table 1B.2, column 5 (preceding the colon), represents the tissue/cell source identifier code corresponding to the code and description provided in Table 4. The second number in column 5 (following the colon) represents the number of times a sequence corresponding to the reference polynucleotide sequence was identified in the corresponding tissue/cell source. Those tissue/cell source identifier codes in which the first two letters are “AR” designate information generated using DNA array technology. Utilizing this technology, cDNAs were amplified by PCR and then transferred, in duplicate, onto the array. Gene expression was assayed through hybridization of first strand cDNA probes to the DNA array. cDNA probes were generated from total RNA extracted from a variety of different tissues and cell lines. Probe synthesis was performed in the presence of ³³P dCTP, using oligo (dT) to prime reverse transcription. After hybridization, high stringency washing conditions were employed to remove non-specific hybrids from the array. The remaining signal, emanating from each gene target, was measured using a Phosphorimager. Gene expression was reported as Phosphor Stimulating Luminescence (PSL) which reflects the level of phosphor signal generated from the probe hybridized to each of the gene targets represented on the array. A local background signal subtraction was performed before the total signal generated from each array was used to normalize gene expression between the different hybridizations. The value presented after “[array code]:” represents the mean of the duplicate values, following background subtraction and probe normalization. One of skill in the art could routinely use this information to identify normal and/or diseased tissue(s) which show a predominant expression pattern of the corresponding polynucleotide of the invention or to identify polynucleotides which show predominant and/or specific tissue and/or cell expression.

TABLE 1B.1

| | | | | | AA | | Tissue Distribution | | |
|---|---|---|---|---|---|---|---|---|---|
| | | | | | SEQ | | Library code: count | | OMIM |
| Gene | | | SEQ ID | ORF | ID | | (see Table IV for | Cytologic | Disease |
| No: | cDNA Clone ID | Contig ID: | NO: X | (From-To) | NO: Y | Predicted Epitopes | Library Codes) | Band | References(s): |
| 1 | HACBT91 | 789939 | 11 | 329-508 | 118 | Ser-49 to Lys-59. | L0665: 5, L0743: 3, | | |
| | | | | | | | H0341: 2, L0761: 2, | | |
| | | | | | | | L0756: 2, S0356: 1, | | |
| | | | | | | | H0734: 1, S0280: 1, | | |
| | | | | | | | T0048: 1, H0271: 1, | | |
| | | | | | | | S0440: 1, H0641: 1, | | |
| | | | | | | | H0646: 1, L0770: 1, | | |
| | | | | | | | L0637: 1, L0800: 1, | | |
| | | | | | | | L0773: 1, L0648: 1, | | |
| | | | | | | | L0662: 1, L0768: 1, | | |
| | | | | | | | L0766: 1, L0649: 1, | | |
| | | | | | | | L0375: 1, L0784: 1, | | |
| | | | | | | | L0806: 1, L0655: 1, | | |
| | | | | | | | L0809: 1, H0672: 1, | | |
| | | | | | | | S0406: 1, L0747: 1, | | |
| | | | | | | | L0749: 1 and L0750: 1. | | |
| 2 | HADDE71 | 839187 | 12 | 250-666 | 119 | Pro-9 to Thr-14, | L0769: 11, L0747: 9, | | |
| | | | | | | Ser-37 to Trp-44, | L0809: 6, S0408: 4, | | |
| | | | | | | Gly-79 to Thr-85, | L0770: 4, L0439: 4, | | |
| | | | | | | Arg-88 to Lys-139. | L0752: 4, L0759: 4, | | |
| | | | | | | | L0766: 3, L0803: 3, | | |
| | | | | | | | L0666: 3, L0751: 3, | | |
| | | | | | | | L0780: 3, S0007: 2, | | |
| | | | | | | | H0619: 2, H0351: 2, | | |
| | | | | | | | H0333: 2, H0427: 2, | | |
| | | | | | | | H0052: 2, L0761: 2, | | |
| | | | | | | | L0662: 2, L0794: 2, | | |
| | | | | | | | L0774: 2, L0806: 2, | | |
| | | | | | | | L0659: 2, H0547: 2, | | |
| | | | | | | | H0521: 2, L0741: 2, | | |
| | | | | | | | L0745: 2, L0750: 2, | | |
| | | | | | | | L0779: 2, L0777: 2, | | |
| | | | | | | | H0543: 2, H0739: 1, | | |
| | | | | | | | H0171: 1, L3019: 1, | | |
| | | | | | | | H0483: 1, H0254: 1, | | |
| | | | | | | | H0125: 1, H0675: 1, | | |
| | | | | | | | H0580: 1, H0722: 1, | | |
| | | | | | | | H0733: 1, S0140: 1, | | |
| | | | | | | | H0261: 1, H0592: 1, | | |
| | | | | | | | H0586: 1, H0587: 1, | | |
| | | | | | | | H0257: 1, H0486: 1, | | |
| | | | | | | | L0022: 1, H0042: 1, | | |
| | | | | | | | H0581: 1, H0150: 1, | | |
| | | | | | | | H0086: 1, H0123: 1, | | |
| | | | | | | | T0010: 1, H0266: 1, | | |
| | | | | | | | H0673: 1, S0364: 1, | | |
| | | | | | | | H0087: 1, H0264: 1, | | |
| | | | | | | | H0494: 1, H0560: 1, | | |
| | | | | | | | H0538: 1, L0762: 1, | | |
| | | | | | | | L0772: 1, L0646: 1, | | |
| | | | | | | | L0765: 1, L0649: 1, | | |
| | | | | | | | L0805: 1, L0776: 1, | | |
| | | | | | | | L0657: 1, L0783: 1, | | |
| | | | | | | | L5622: 1, L0791: 1, | | |
| | | | | | | | L2654: 1, S0126: 1, | | |
| | | | | | | | H0435: 1, S0330: 1, | | |
| | | | | | | | H0522: 1, L0743: 1, | | |
| | | | | | | | L0744: 1, L0749: 1, | | |
| | | | | | | | L0786: 1, L0753: 1, | | |
| | | | | | | | L0755: 1, L0731: 1, | | |
| | | | | | | | L0758: 1, S0436: 1, | | |
| | | | | | | | S0011: 1 and S0192: 1. | | |
| 3 | HADDJ13 | 827273 | 13 | 347-439 | 120 | | H0427: 1 | | |
| 4 | HADMA77 | 783049 | 14 | 992-1063 | 121 | | L0439: 15, S0222: 4, | 3 | |
| | | | | | | | L0157: 4, L0769: 4, | | |
| | | | | | | | L0438: 3, L0745: 3, | | |
| | | | | | | | L0731: 3, L0758: 3, | | |
| | | | | | | | L0599: 3, H0443: 2, | | |
| | | | | | | | H0441: 2, S0010: 2, | | |
| | | | | | | | L0662: 2, L0744: 2, | | |
| | | | | | | | L0748: 2, L0750: 2, | | |
| | | | | | | | L0756: 2, L0777: 2, | | |
| | | | | | | | H0583: 1, L0005: 1, | | |
| | | | | | | | S0354: 1, H0675: 1, | | |
| | | | | | | | S0408: 1, H0619: 1, | | |
| | | | | | | | H0369: 1, H0574: 1, | | |
| | | | | | | | H0486: 1, H0390: 1, | | |
| | | | | | | | S0346: 1, H0309: 1, | | |
| | | | | | | | H0597: 1, T0003: 1, | | |
| | | | | | | | H0024: 1, S6028: 1, | | |
| | | | | | | | H0028: 1, T0006: 1, | | |
| | | | | | | | H0628: 1, H0135: 1, | | |
| | | | | | | | H0551: 1, S0438: 1, | | |
| | | | | | | | L0520: 1, L0768: 1, | | |
| | | | | | | | L0776: 1, L0559: 1, | | |
| | | | | | | | L0659: 1, L0384: 1, | | |
| | | | | | | | L0809: 1, H0144: 1, | | |
| | | | | | | | H0547: 1, L0746: 1, | | |
| | | | | | | | L0747: 1, L0757: 1 and | | |
| | | | | | | | S0434: 1. | | |
| 5 | HADMB15 | 847116 | 15 | 238-300 | 122 | | L0595: 2, L0442: 1, | 7 | |
| | | | | | | | L0005: 1, L3653: 1, | | |
| | | | | | | | H0390: 1, H0081: 1, | | |
| | | | | | | | H0024: 1, L0770: 1, | | |
| | | | | | | | L5566: 1, L0651: 1, | | |
| | | | | | | | L0565: 1, L0439: 1, | | |
| | | | | | | | L0747: 1, L0752: 1, | | |
| | | | | | | | H0445: 1, L0592: 1 and | | |
| | | | | | | | L0599: 1. | | |
| 6 | HAGBQ12 | 722205 | 16 | 171-236 | 123 | | L0754: 4, L0805: 2, | | |
| | | | | | | | L0777: 2, L0755: 2, | | |
| | | | | | | | S0010: 1, H0049: 1, | | |
| | | | | | | | L0163: 1, L0771: 1, | | |
| | | | | | | | L0775: 1 and L0776: 1. | | |
| 7 | HAGCC87 | 638587 | 17 | 509-538 | 124 | | L0439: 4, L0519: 3, | | |
| | | | | | | | S0010: 2, T0010: 1, | | |
| | | | | | | | L0809: 1, H0682: 1, | | |
| | | | | | | | S0404: 1, S0406: 1, | | |
| | | | | | | | H0436: 1 and L0756: 1. | | |
| 8 | HAGHN57 | 773286 | 18 | 900-932 | 125 | | H0521: 5, L0777: 5, | | |
| | | | | | | | S0376: 4, H0733: 3, | | |
| | | | | | | | H0156: 3, H0519: 3, | | |
| | | | | | | | H0436: 3, L0731: 3, | | |
| | | | | | | | H0656: 2, H0580: 2, | | |
| | | | | | | | H0747: 2, L3816: 2, | | |
| | | | | | | | H0036: 2, L0471: 2, | | |
| | | | | | | | H0090: 2, H0040: 2, | | |
| | | | | | | | H0551: 2, H0494: 2, | | |
| | | | | | | | S0438: 2, S0440: 2, | | |
| | | | | | | | H0529: 2, L0809: 2, | | |
| | | | | | | | H0144: 2, S0374: 2, | | |
| | | | | | | | H0593: 2, H0170: 1, | | |
| | | | | | | | L3643: 1, H0583: 1, | | |
| | | | | | | | H0650: 1, S0418: 1, | | |
| | | | | | | | S0358: 1, S0444: 1, | | |
| | | | | | | | L3645: 1, H0741: 1, | | |
| | | | | | | | H0734: 1, S0045: 1, | | |
| | | | | | | | S0476: 1, H0619: 1, | | |
| | | | | | | | H0586: 1, H0643: 1, | | |
| | | | | | | | H0632: 1, H0486: 1, | | |
| | | | | | | | S0280: 1, H0590: 1, | | |
| | | | | | | | S0010: 1, S0346: 1, | | |
| | | | | | | | H0581: 1, H0231: 1, | | |
| | | | | | | | H0046: 1, H0123: 1, | | |
| | | | | | | | S6028: 1, H0687: 1, | | |
| | | | | | | | S0003: 1, S0214: 1, | | |
| | | | | | | | H0252: 1, H0615: 1, | | |
| | | | | | | | H0212: 1, L0455: 1, | | |
| | | | | | | | S0366: 1, H0163: 1, | | |
| | | | | | | | H0038: 1, H0634: 1, | | |
| | | | | | | | T0067: 1, L0475: 1, | | |
| | | | | | | | H0560: 1, H0561: 1, | | |
| | | | | | | | S0464: 1, H0646: 1, | | |
| | | | | | | | S0426: 1, H0026: 1, | | |
| | | | | | | | L0790: 1, H0520: 1, | | |
| | | | | | | | H0435: 1, S0328: 1, | | |
| | | | | | | | H0539: 1, H0704: 1, | | |
| | | | | | | | S0027: 1, L0439: 1, | | |
| | | | | | | | L0750: 1, L0756: 1, | | |
| | | | | | | | L0757: 1, S0434: 1, | | |
| | | | | | | | L0581: 1, L0595: 1, | | |
| | | | | | | | H0543: 1 and H0423: 1. | | |
| 9 | HAGHR18 | 655435 | 19 | 28-126 | 126 | | L0717: 1 and S0346: 1. | 8 | |
| 10 | HAQAI92 | 688037 | 20 | 250-321 | 127 | | H0617: 5, H0606: 2, | 20, 4 | |
| | | | | | | | L0744: 2, L0779: 2, | | |
| | | | | | | | H0295: 1, H0100: 1, | | |
| | | | | | | | S0440: 1, H0026: 1, | | |
| | | | | | | | L0762: 1, L0504: 1, | | |
| | | | | | | | L0769: 1, L0764: 1, | | |
| | | | | | | | L0662: 1, L0649: 1, | | |
| | | | | | | | L0804: 1, L0787: 1, | | |
| | | | | | | | L0666: 1, L0663: 1, | | |
| | | | | | | | H0520: 1, L0748: 1, | | |
| | | | | | | | L0751: 1, L0752: 1 and | | |
| | | | | | | | S0436: 1. | | |
| 11 | HAQBG57 | 837545 | 21 | 170-340 | 128 | Trp-10 to Lys-18, | H0295: 6, H0255: 2, | | |
| | | | | | | Val-32 to Cys-38, | H0392: 1, H0587: 1, | | |
| | | | | | | Asp-41 to Thr-47. | H0333: 1, H0545: 1, | | |
| | | | | | | | H0328: 1, H0616: 1, | | |
| | | | | | | | S0142: 1, H0529: 1, | | |
| | | | | | | | L0659: 1, L0783: 1, | | |
| | | | | | | | L0528: 1, H0547: 1, | | |
| | | | | | | | S0136: 1, S0390: 1, | | |
| | | | | | | | L0754: 1, L0747: 1 and | | |
| | | | | | | | L0752: 1. | | |
| 12 | HAQCE11 | 633730 | 22 | 262-273 | 129 | | H0295: 5 and L0438: 1. | | |
| 13 | HBAGD86 | 838799 | 23 | 521-580 | 130 | | L0809: 4, L0766: 3, | 2 | |
| | | | | | | | L0439: 3, H0624: 2, | | |
| | | | | | | | H0411: 2, L0794: 2, | | |
| | | | | | | | L0749: 2, L0756: 2, | | |
| | | | | | | | L0005: 1, L3649: 1, | | |
| | | | | | | | S0476: 1, H0599: 1, | | |
| | | | | | | | L0471: 1, S0051: 1, | | |
| | | | | | | | T0010: 1, H0266: 1, | | |
| | | | | | | | S0150: 1, S0422: 1, | | |
| | | | | | | | L0637: 1, L0765: 1, | | |
| | | | | | | | L0803: 1, L0783: 1, | | |
| | | | | | | | L5622: 1, H0144: 1, | | |
| | | | | | | | H0672: 1, S0392: 1, | | |
| | | | | | | | L0748: 1, L0754: 1, | | |
| | | | | | | | L0779: 1, L0777: 1, | | |
| | | | | | | | L0731: 1 and L0759: 1. | | |
| 14 | HBGBC29 | 691473 | 24 | 1016-1024 | 131 | | L0731: 20, L0747: 7, | | |
| | | | | | | | L0794: 6, L0764: 4, | | |
| | | | | | | | L0803: 4, L0759: 4, | | |
| | | | | | | | L0662: 3, L0774: 3, | | |
| | | | | | | | L0749: 3, L0756: 3, | | |
| | | | | | | | S0436: 3, S0360: 2, | | |
| | | | | | | | H0156: 2, H0046: 2, | | |
| | | | | | | | H0181: 2, L0766: 2, | | |
| | | | | | | | L0659: 2, L0809: 2, | | |
| | | | | | | | L0438: 2, S0126: 2, | | |
| | | | | | | | H0658: 2, L0439: 2, | | |
| | | | | | | | L0754: 2, L0777: 2, | | |
| | | | | | | | L0755: 2, L0757: 2, | | |
| | | | | | | | L0604: 2, S0242: 2, | | |
| | | | | | | | S0442: 1, S0376: 1, | | |
| | | | | | | | S0408: 1, L0717: 1, | | |
| | | | | | | | H0270: 1, H0263: 1, | | |
| | | | | | | | H0597: 1, H0123: 1, | | |
| | | | | | | | H0617: 1, H0551: 1, | | |
| | | | | | | | S0440: 1, H0647: 1, | | |
| | | | | | | | L0770: 1, L0769: 1, | | |
| | | | | | | | L0638: 1, L0775: 1, | | |
| | | | | | | | L0651: 1, L0527: 1, | | |
| | | | | | | | L0526: 1, L0789: 1, | | |
| | | | | | | | L0666: 1, L0665: 1, | | |
| | | | | | | | H0547: 1, H0435: 1, | | |
| | | | | | | | H0648: 1, S0330: 1, | | |
| | | | | | | | S0406: 1, H0627: 1, | | |
| | | | | | | | L0750: 1, L0780: 1, | | |
| | | | | | | | L0752: 1, L0758: 1, | | |
| | | | | | | | L0366: 1 and H0293: 1. | | |
| 15 | HBJAB02 | 837309 | 25 | 84-188 | 132 | Arg-24 to Asp-31. | S0434: 5, L0794: 3, | 17 | |
| | | | | | | | H0255: 2, H0318: 2, | | |
| | | | | | | | H0251: 2, L0764: 2, | | |
| | | | | | | | L0628: 2, L0809: 2, | | |
| | | | | | | | L0665: 2, H0658: 2, | | |
| | | | | | | | S0406: 2, L0361: 2, | | |
| | | | | | | | H0265: 1, H0685: 1, | | |
| | | | | | | | H0657: 1, H0483: 1, | | |
| | | | | | | | S0420: 1, S0442: 1, | | |
| | | | | | | | S0358: 1, H0729: 1, | | |
| | | | | | | | H0734: 1, S0132: 1, | | |
| | | | | | | | S0222: 1, T0082: 1, | | |
| | | | | | | | H0150: 1, H0083: 1, | | |
| | | | | | | | S0214: 1, H0252: 1, | | |
| | | | | | | | H0628: 1, T0041: 1, | | |
| | | | | | | | S0344: 1, H0529: 1, | | |
| | | | | | | | L0520: 1, L0535: 1, | | |
| | | | | | | | L0662: 1, L0387: 1, | | |
| | | | | | | | L0375: 1, L0518: 1, | | |
| | | | | | | | L0666: 1, L0663: 1, | | |
| | | | | | | | H0726: 1, H0519: 1, | | |
| | | | | | | | H0670: 1, H0660: 1, | | |
| | | | | | | | L0602: 1, L0747: 1, | | |
| | | | | | | | L0777: 1, L0601: 1, | | |
| | | | | | | | S0276: 1, H0423: 1 and | | |
| | | | | | | | H0422: 1. | | |
| 16 | HBMUH74 | 866160 | 26 | 344-430 | 133 | | L0754: 3, L0777: 3, | | |
| | | | | | | | L0439: 2, S0116: 1, | | |
| | | | | | | | H0341: 1, H0661: 1, | | |
| | | | | | | | H0038: 1, H0412: 1, | | |
| | | | | | | | L0761: 1, L0667: 1, | | |
| | | | | | | | L0764: 1, L0788: 1, | | |
| | | | | | | | H0435: 1, L0749: 1, | | |
| | | | | | | | L0779: 1 and L0758: 1. | | |
| 17 | HBNAX40 | 834801 | 27 | 2497-2646 | 134 | | L0439: 11, H0171: 5, | | |
| | | | | | | | L0754: 5, L0748: 4, | | |
| | | | | | | | H0052: 3, L0662: 3, | | |
| | | | | | | | L0756: 3, L0755: 3, | | |
| | | | | | | | H0422: 3, S0360: 2, | | |
| | | | | | | | L0738: 2, H0032: 2, | | |
| | | | | | | | L0803: 2, L0655: 2, | | |
| | | | | | | | L0789: 2, L0605: 2, | | |
| | | | | | | | H0423: 2, H0638: 1, | | |
| | | | | | | | T0114: 1, H0156: 1, | | |
| | | | | | | | L0021: 1, S0010: 1, | | |
| | | | | | | | H0581: 1, H0046: 1, | | |
| | | | | | | | L0471: 1, H0014: 1, | | |
| | | | | | | | H0356: 1, H0188: 1, | | |
| | | | | | | | H0553: 1, H0591: 1, | | |
| | | | | | | | S0386: 1, T0042: 1, | | |
| | | | | | | | H0625: 1, H0641: 1, | | |
| | | | | | | | S0142: 1, L0598: 1, | | |
| | | | | | | | L0369: 1, L0640: 1, | | |
| | | | | | | | L0375: 1, L0654: 1, | | |
| | | | | | | | L0659: 1, L0783: 1, | | |
| | | | | | | | L0663: 1, L0665: 1, | | |
| | | | | | | | H0144: 1, L0352: 1, | | |
| | | | | | | | H0547: 1, H0648: 1, | | |
| | | | | | | | H0672: 1, H0555: 1, | | |
| | | | | | | | H0436: 1, L0749: 1, | | |
| | | | | | | | L0779: 1, L0731: 1, | | |
| | | | | | | | L0758: 1, L0759: 1, | | |
| | | | | | | | H0445: 1, L0366: 1 and | | |
| | | | | | | | H0668: 1. | | |
| 18 | HBXCX15 | 637542 | 28 | 72-77 | 135 | | S0038: 3, H0438: 1, | | |
| | | | | | | | L0363: 1 and S0053: 1. | | |
| 19 | HCDBO32 | 831942 | 29 | 1669-1884 | 136 | Val-2 to Thr-7. | L0803: 7, L0766: 4, | | |
| | | | | | | | L0777: 4, L0666: 3, | | |
| | | | | | | | H0521: 3, T0115: 2, | | |
| | | | | | | | H0687: 2, L0809: 2, | | |
| | | | | | | | L0659: 2, L0754: 2, | | |
| | | | | | | | L0779: 2, L0759: 2, | | |
| | | | | | | | L3643: 1, H0341: 1, | | |
| | | | | | | | H0747: 1, H0749: 1, | | |
| | | | | | | | L3387: 1, H0351: 1, | | |
| | | | | | | | S0222: 1, H0441: 1, | | |
| | | | | | | | L3816: 1, H0013: 1, | | |
| | | | | | | | S0280: 1, H0251: 1, | | |
| | | | | | | | H0544: 1, H0123: 1, | | |
| | | | | | | | H0354: 1, H0266: 1, | | |
| | | | | | | | H0622: 1, H0090: 1, | | |
| | | | | | | | T0041: 1, H0641: 1, | | |
| | | | | | | | S0422: 1, L0371: 1, | | |
| | | | | | | | L0646: 1, L0662: 1, | | |
| | | | | | | | L0774: 1, L0805: 1, | | |
| | | | | | | | L0653: 1, L0659: 1, | | |
| | | | | | | | L0635: 1, L0526: 1, | | |
| | | | | | | | L0783: 1, L0663: 1, | | |
| | | | | | | | L0664: 1, L0665: 1, | | |
| | | | | | | | H0144: 1, T0068: 1, | | |
| | | | | | | | L3811: 1, H0519: 1, | | |
| | | | | | | | H0682: 1, S0152: 1, | | |
| | | | | | | | S0136: 1, L0744: 1, | | |
| | | | | | | | L0780: 1, L0758: 1, | | |
| | | | | | | | H0444: 1, H0445: 1, | | |
| | | | | | | | L0590: 1, L0594: 1, | | |
| | | | | | | | S0026: 1 and H0422: 1. | | |
| 20 | HCEEE79 | 560609 | 30 | 131-298 | 137 | Gly-35 to Pro-41. | H0052: 1 | | |
| 21 | HCEFZ82 | 831745 | 31 | 215-1012 | 138 | Tyr-30 to Gln-35, | L0748: 11, H0052: 8, | | |
| | | | | | | Asn-114 to Lys-119, | L0803: 8, L0749: 8, | | |
| | | | | | | Ser-161 to Ala-171, | L0770: 7, L0439: 5, | | |
| | | | | | | Arg-183 to Gly-189, | L0746: 4, L0752: 4, | | |
| | | | | | | Pro-205 to Ala-211, | L3811: 3, H0575: 2, | | |
| | | | | | | Lys-231 to Trp-237, | H0012: 2, H0031: 2, | | |
| | | | | | | Gly-246 to Lys-265. | L0768: 2, L0804: 2, | | |
| | | | | | | | L0774: 2, L0740: 2, | | |
| | | | | | | | L0747: 2, L0756: 2, | | |
| | | | | | | | L0779: 2, L0757: 2, | | |
| | | | | | | | L0758: 2, L0592: 2, | | |
| | | | | | | | L0593: 2, H0556: 1, | | |
| | | | | | | | S0420: 1, S0376: 1, | | |
| | | | | | | | H0441: 1, H0632: 1, | | |
| | | | | | | | S0010: 1, T0115: 1, | | |
| | | | | | | | H0545: 1, H0009: 1, | | |
| | | | | | | | H0620: 1, H0197: 1, | | |
| | | | | | | | H0051: 1, S0388: 1, | | |
| | | | | | | | S0051: 1, H0252: 1, | | |
| | | | | | | | H0032: 1, L0455: 1, | | |
| | | | | | | | H0591: 1, H0272: 1, | | |
| | | | | | | | L0564: 1, S0438: 1, | | |
| | | | | | | | S0344: 1, L0373: 1, | | |
| | | | | | | | L0646: 1, L0794: 1, | | |
| | | | | | | | L0766: 1, L0805: 1, | | |
| | | | | | | | L0776: 1, L0783: 1, | | |
| | | | | | | | L0809: 1, S0374: 1, | | |
| | | | | | | | H0522: 1, H0134: 1, | | |
| | | | | | | | L0780: 1, L0731: 1, | | |
| | | | | | | | L0759: 1, S0436: 1, | | |
| | | | | | | | L0597: 1, H0543: 1, | | |
| | | | | | | | H0423: 1 and L0600: 1. | | |
| 22 | HCUCF89 | 637986 | 32 | 189-278 | 139 | Gly-14 to Asp-21. | H0306: 1, L0761: 1 and | | |
| | | | | | | | H0436: 1. | | |
| 23 | HCWAE64 | 535893 | 33 | 410-427 | 140 | | H0305: 1 | 9 | |
| 24 | HCWUL09 | 834722 | 34 | 333-368 | 141 | | H0305: 9, H0589: 2 and | 6 | |
| | | | | | | | S0001: 1. | | |
| 25 | HDPDI72 | 897277 | 35 | 23-385 | 142 | Arg-63 to Phe-72, | H0521: 2 and H0580: 1. | 10 | |
| | | | | | | Ile-114 to Phe-120. | | | |
| 26 | HDPFY18 | 779450 | 36 | 161-184 | 143 | | S0114: 1, H0427: 1, | 11 | |
| | | | | | | | H0123: 1, H0688: 1, | | |
| | | | | | | | H0264: 1, L0547: 1, | | |
| | | | | | | | L0518: 1, L3811: 1, | | |
| | | | | | | | H0521: 1, H0445: 1 and | | |
| | | | | | | | H0543: 1. | | |
| 27 | HDPIE44 | 899328 | 37 | 169-351 | 144 | | L3811: 7, L0439: 7, | | |
| | | | | | | | L0794: 6, L0759: 5, | | |
| | | | | | | | L0591: 5, L0803: 4, | | |
| | | | | | | | L0805: 4, L2653: 4, | | |
| | | | | | | | H0547: 4, L0748: 4, | | |
| | | | | | | | L0755: 4, L0596: 4, | | |
| | | | | | | | H0171: 3, L2886: 3, | | |
| | | | | | | | S0376: 3, S0007: 3, | | |
| | | | | | | | H0024: 3, H0355: 3, | | |
| | | | | | | | H0615: 3, H0428: 3, | | |
| | | | | | | | H0090: 3, H0623: 3, | | |
| | | | | | | | S0422: 3, L0766: 3, | | |
| | | | | | | | L0659: 3, H0144: 3, | | |
| | | | | | | | H0658: 3, S0406: 3, | | |
| | | | | | | | L0749: 3, L0758: 3, | | |
| | | | | | | | S0436: 3, H0624: 2, | | |
| | | | | | | | H0717: 2, S0358: 2, | | |
| | | | | | | | S0360: 2, H0486: 2, | | |
| | | | | | | | L2636: 2, H0427: 2, | | |
| | | | | | | | S0010: 2, H0052: 2, | | |
| | | | | | | | H0251: 2, H0687: 2, | | |
| | | | | | | | H0622: 2, H0553: 2, | | |
| | | | | | | | H0644: 2, H0591: 2, | | |
| | | | | | | | S0438: 2, L0770: 2, | | |
| | | | | | | | L0769: 2, L0662: 2, | | |
| | | | | | | | S0374: 2, L3827: 2, | | |
| | | | | | | | L3828: 2, S0126: 2, | | |
| | | | | | | | H0689: 2, H0670: 2, | | |
| | | | | | | | H0521: 2, S0028: 2, | | |
| | | | | | | | L0744: 2, L0740: 2, | | |
| | | | | | | | L0754: 2, L0752: 2, | | |
| | | | | | | | L0593: 2, S0192: 2, | | |
| | | | | | | | H0506: 2, H0265: 1, | | |
| | | | | | | | H0294: 1, H0656: 1, | | |
| | | | | | | | S0212: 1, L0481: 1, | | |
| | | | | | | | S0418: 1, L0005: 1, | | |
| | | | | | | | L1563: 1, S0356: 1, | | |
| | | | | | | | S0442: 1, S0408: 1, | | |
| | | | | | | | H0733: 1, H0208: 1, | | |
| | | | | | | | S0045: 1, H0619: 1, | | |
| | | | | | | | L3261: 1, L0717: 1, | | |
| | | | | | | | S0222: 1, H0455: 1, | | |
| | | | | | | | L2647: 1, L3653: 1, | | |
| | | | | | | | H0013: 1, H0599: 1, | | |
| | | | | | | | S0474: 1, H0196: 1, | | |
| | | | | | | | H0263: 1, H0046: 1, | | |
| | | | | | | | H0172: 1, H0050: 1, | | |
| | | | | | | | L0471: 1, H0012: 1, | | |
| | | | | | | | H0620: 1, H0014: 1, | | |
| | | | | | | | H0051: 1, H0356: 1, | | |
| | | | | | | | H0375: 1, S0316: 1, | | |
| | | | | | | | H0328: 1, H0688: 1, | | |
| | | | | | | | L0483: 1, S0364: 1, | | |
| | | | | | | | S0366: 1, H0135: 1, | | |
| | | | | | | | H0163: 1, H0038: 1, | | |
| | | | | | | | H0040: 1, H0634: 1, | | |
| | | | | | | | H0551: 1, H0488: 1, | | |
| | | | | | | | T0042: 1, H0494: 1, | | |
| | | | | | | | S0016: 1, H0625: 1, | | |
| | | | | | | | H0561: 1, S0440: 1, | | |
| | | | | | | | L2270: 1, S0344: 1, | | |
| | | | | | | | L3818: 1, H0538: 1, | | |
| | | | | | | | L0598: 1, L0638: 1, | | |
| | | | | | | | L0761: 1, L0641: 1, | | |
| | | | | | | | L0626: 1, L0804: 1, | | |
| | | | | | | | L0375: 1, L0784: 1, | | |
| | | | | | | | L0523: 1, L0806: 1, | | |
| | | | | | | | L0776: 1, L0526: 1, | | |
| | | | | | | | L0809: 1, L5622: 1, | | |
| | | | | | | | L0789: 1, L0793: 1, | | |
| | | | | | | | L4559: 1, L0663: 1, | | |
| | | | | | | | L4560: 1, L3871: 1, | | |
| | | | | | | | L2657: 1, L2655: 1, | | |
| | | | | | | | L2263: 1, L2258: 1, | | |
| | | | | | | | L3826: 1, L3204: 1, | | |
| | | | | | | | H0683: 1, H0672: 1, | | |
| | | | | | | | H0651: 1, S0330: 1, | | |
| | | | | | | | H0539: 1, L3832: 1, | | |
| | | | | | | | H0555: 1, S0390: 1, | | |
| | | | | | | | S0206: 1, L0747: 1, | | |
| | | | | | | | L0779: 1, S0308: 1, | | |
| | | | | | | | L0604: 1 and H0423: 1. | | |
| 28 | HDPIU94 | 813352 | 38 | 208-279 | 145 | | L0748: 6, L0666: 5, | | |
| | | | | | | | L0665: 5, L0768: 4, | | |
| | | | | | | | L0777: 4, L0595: 4, | | |
| | | | | | | | H0352: 4, S0045: 3, | | |
| | | | | | | | H0124: 3, L0774: 3, | | |
| | | | | | | | S0028: 3, L0439: 3, | | |
| | | | | | | | L0756: 3, L0592: 3, | | |
| | | | | | | | S0376: 2, S0360: 2, | | |
| | | | | | | | H0619: 2, S0222: 2, | | |
| | | | | | | | L3816: 2, H0635: 2, | | |
| | | | | | | | H0036: 2, H0052: 2, | | |
| | | | | | | | H0046: 2, L0041: 2, | | |
| | | | | | | | S0312: 2, H0551: 2, | | |
| | | | | | | | L3815: 2, L0764: 2, | | |
| | | | | | | | L0663: 2, H0144: 2, | | |
| | | | | | | | L3825: 2, L0751: 2, | | |
| | | | | | | | L0754: 2, L0745: 2, | | |
| | | | | | | | L0731: 2, L0589: 2, | | |
| | | | | | | | H0653: 2, H0136: 2, | | |
| | | | | | | | H0216: 2, H0624: 1, | | |
| | | | | | | | S6024: 1, S0430: 1, | | |
| | | | | | | | H0656: 1, H0255: 1, | | |
| | | | | | | | S0046: 1, H0747: 1, | | |
| | | | | | | | H0645: 1, L2759: 1, | | |
| | | | | | | | H0013: 1, H0156: 1, | | |
| | | | | | | | H0575: 1, H0050: 1, | | |
| | | | | | | | S0050: 1, H0373: 1, | | |
| | | | | | | | H0687: 1, S0314: 1, | | |
| | | | | | | | S0250: 1, H0031: 1, | | |
| | | | | | | | H0135: 1, H0634: 1, | | |
| | | | | | | | H0616: 1, H0380: 1, | | |
| | | | | | | | H0264: 1, H0433: 1, | | |
| | | | | | | | H0059: 1, L0351: 1, | | |
| | | | | | | | S0422: 1, L0800: 1, | | |
| | | | | | | | L0662: 1, L0626: 1, | | |
| | | | | | | | L0766: 1, L0803: 1, | | |
| | | | | | | | L0375: 1, L0655: 1, | | |
| | | | | | | | L0659: 1, L0783: 1, | | |
| | | | | | | | L0809: 1, L0664: 1, | | |
| | | | | | | | L2263: 1, L2258: 1, | | |
| | | | | | | | L2259: 1, H0726: 1, | | |
| | | | | | | | L3826: 1, L3827: 1, | | |
| | | | | | | | H0648: 1, S0152: 1, | | |
| | | | | | | | L3833: 1, H0521: 1, | | |
| | | | | | | | S0390: 1, S3014: 1, | | |
| | | | | | | | S0027: 1, L0749: 1, | | |
| | | | | | | | L0750: 1, L0780: 1, | | |
| | | | | | | | L0758: 1, L0759: 1, | | |
| | | | | | | | S0260: 1 and L0366: 1. | | |
| 29 | HDPPD93 | 637588 | 39 | 28-66 | 146 | | L0794: 6, L0748: 6, | | |
| | | | | | | | L0556: 5, L0771: 5, | | |
| | | | | | | | H0052: 4, L0756: 4, | | |
| | | | | | | | L0596: 4, H0265: 3, | | |
| | | | | | | | H0341: 3, H0587: 3, | | |
| | | | | | | | L0662: 3, L0803: 3, | | |
| | | | | | | | L0790: 3, S0152: 3, | | |
| | | | | | | | L0750: 3, S0114: 2, | | |
| | | | | | | | S0360: 2, H0318: 2, | | |
| | | | | | | | L0471: 2, L0369: 2, | | |
| | | | | | | | L0763: 2, L0770: 2, | | |
| | | | | | | | L0764: 2, L0766: 2, | | |
| | | | | | | | L0774: 2, L0378: 2, | | |
| | | | | | | | L0789: 2, L0666: 2, | | |
| | | | | | | | L3825: 2, H0547: 2, | | |
| | | | | | | | L0747: 2, L0777: 2, | | |
| | | | | | | | L0581: 2, H0543: 2, | | |
| | | | | | | | H0422: 2, S0218: 1, | | |
| | | | | | | | H0255: 1, S0418: 1, | | |
| | | | | | | | S0354: 1, S0376: 1, | | |
| | | | | | | | S0408: 1, L3649: 1, | | |
| | | | | | | | S0045: 1, H0747: 1, | | |
| | | | | | | | H0619: 1, L0717: 1, | | |
| | | | | | | | S0222: 1, H0431: 1, | | |
| | | | | | | | H0586: 1, H0013: 1, | | |
| | | | | | | | H0069: 1, S0049: 1, | | |
| | | | | | | | H0009: 1, H0071: 1, | | |
| | | | | | | | H0083: 1, H0428: 1, | | |
| | | | | | | | T0006: 1, H0424: 1, | | |
| | | | | | | | H0213: 1, H0644: 1, | | |
| | | | | | | | H0628: 1, H0135: 1, | | |
| | | | | | | | H0163: 1, H0616: 1, | | |
| | | | | | | | H0413: 1, H0059: 1, | | |
| | | | | | | | H0561: 1, S0448: 1, | | |
| | | | | | | | H0647: 1, L3818: 1, | | |
| | | | | | | | S0002: 1, L0769: 1, | | |
| | | | | | | | L0800: 1, L0363: 1, | | |
| | | | | | | | L0767: 1, L0768: 1, | | |
| | | | | | | | L0649: 1, L0804: 1, | | |
| | | | | | | | L0806: 1, L0657: 1, | | |
| | | | | | | | L0512: 1, L0659: 1, | | |
| | | | | | | | L0384: 1, L0647: 1, | | |
| | | | | | | | L5622: 1, L5623: 1, | | |
| | | | | | | | L0664: 1, L0665: 1, | | |
| | | | | | | | S0374: 1, L3828: 1, | | |
| | | | | | | | S0126: 1, H0711: 1, | | |
| | | | | | | | H0658: 1, H0666: 1, | | |
| | | | | | | | H0539: 1, H0753: 1, | | |
| | | | | | | | H0521: 1, H0522: 1, | | |
| | | | | | | | S0406: 1, H0555: 1, | | |
| | | | | | | | H0436: 1, L0439: 1, | | |
| | | | | | | | L0749: 1, S0031: 1, | | |
| | | | | | | | L0595: 1, H0136: 1, | | |
| | | | | | | | H0542: 1, H0423: 1, | | |
| | | | | | | | S0424: 1 and H0352: 1. | | |
| 30 | HDTLM18 | 836057 | 40 | 345-524 | 147 | Ile-47 to Ser-60. | H0486: 1 and L0599: 1. | 6 | |
| 31 | HE6CS65 | 762960 | 41 | 295-483 | 148 | Trp-50 to Leu-55. | L0777: 16, L0748: 12, | | |
| | | | | | | | L0757: 11, L0776: 8, | | |
| | | | | | | | L0439: 7, H0692: 6, | | |
| | | | | | | | H0046: 6, L0769: 5, | | |
| | | | | | | | L0666: 5, S0242: 5, | | |
| | | | | | | | L0770: 4, L0771: 4, | | |
| | | | | | | | L0438: 4, L0743: 4, | | |
| | | | | | | | L0754: 4, L0749: 4, | | |
| | | | | | | | L0758: 4, S0444: 3, | | |
| | | | | | | | H0051: 3, L0662: 3, | | |
| | | | | | | | L0766: 3, S0378: 3, | | |
| | | | | | | | L0751: 3, L0747: 3, | | |
| | | | | | | | S0436: 3, S0212: 2, | | |
| | | | | | | | H0637: 2, H0497: 2, | | |
| | | | | | | | H0545: 2, H0050: 2, | | |
| | | | | | | | H0031: 2, H0090: 2, | | |
| | | | | | | | H0100: 2, L0768: 2, | | |
| | | | | | | | L0561: 2, L0774: 2, | | |
| | | | | | | | L0775: 2, L0657: 2, | | |
| | | | | | | | H0670: 2, S3014: 2, | | |
| | | | | | | | L0744: 2, L0752: 2, | | |
| | | | | | | | L0581: 2, H0624: 1, | | |
| | | | | | | | H0170: 1, H0713: 1, | | |
| | | | | | | | H0717: 1, S6024: 1, | | |
| | | | | | | | T0049: 1, H0255: 1, | | |
| | | | | | | | S0356: 1, S0442: 1, | | |
| | | | | | | | S0358: 1, S0376: 1, | | |
| | | | | | | | S0360: 1, H0619: 1, | | |
| | | | | | | | L3651: 1, L0717: 1, | | |
| | | | | | | | S0278: 1, H0391: 1, | | |
| | | | | | | | H0333: 1, H0013: 1, | | |
| | | | | | | | H0053: 1, H0575: 1, | | |
| | | | | | | | S0346: 1, H0052: 1, | | |
| | | | | | | | H0263: 1, H0596: 1, | | |
| | | | | | | | L0738: 1, H0572: 1, | | |
| | | | | | | | H0510: 1, H0266: 1, | | |
| | | | | | | | H0688: 1, H0039: 1, | | |
| | | | | | | | H0622: 1, H0111: 1, | | |
| | | | | | | | H0181: 1, H0617: 1, | | |
| | | | | | | | H0032: 1, H0169: 1, | | |
| | | | | | | | H0634: 1, H0087: 1, | | |
| | | | | | | | H0412: 1, S0450: 1, | | |
| | | | | | | | S0440: 1, L0639: 1, | | |
| | | | | | | | L0637: 1, L0372: 1, | | |
| | | | | | | | L0646: 1, L0651: 1, | | |
| | | | | | | | L0806: 1, L0659: 1, | | |
| | | | | | | | L0792: 1, L0664: 1, | | |
| | | | | | | | L0665: 1, S0216: 1, | | |
| | | | | | | | H0144: 1, H0697: 1, | | |
| | | | | | | | S0374: 1, L3812: 1, | | |
| | | | | | | | H0520: 1, H0547: 1, | | |
| | | | | | | | H0658: 1, H0660: 1, | | |
| | | | | | | | H0648: 1, H0521: 1, | | |
| | | | | | | | H0696: 1, S0027: 1, | | |
| | | | | | | | S0028: 1, L0741: 1, | | |
| | | | | | | | L0740: 1, L0779: 1, | | |
| | | | | | | | L0731: 1, L0759: 1, | | |
| | | | | | | | S0260: 1, H0445: 1, | | |
| | | | | | | | S0434: 1, L0362: 1 and | | |
| | | | | | | | L0366: 1. | | |
| 32 | HE8BQ49 | 589443 | 42 | 133-168 | 149 | | H0013: 2 | | |
| 33 | HE9CY05 | 834826 | 43 | 55-762 | 150 | Ser-18 to Glu-24, | L0748: 8, L0749: 3, | | |
| | | | | | | Leu-121 to Asp-134, | L0471: 2 and H0144: 1. | | |
| | | | | | | Pro-142 to Ala-154, | | | |
| | | | | | | Cys-185 to Val-203. | | | |
| 34 | HEAAW94 | 847340 | 44 | 189-224 | 151 | | L0439: 26, L0438: 20, | | |
| | | | | | | | L0748: 17, L0766: 16, | | |
| | | | | | | | L0754: 16, L0731: 16, | | |
| | | | | | | | L0556: 9, L0740: 8, | | |
| | | | | | | | S0222: 7, H0090: 7, | | |
| | | | | | | | L0774: 7, H0144: 6, | | |
| | | | | | | | L0745: 6, L0779: 6, | | |
| | | | | | | | L0777: 6, L0758: 6, | | |
| | | | | | | | S0003: 5, L0662: 5, | | |
| | | | | | | | L0794: 5, S0418: 4, | | |
| | | | | | | | H0575: 4, L0776: 4, | | |
| | | | | | | | L0751: 4, L0749: 4, | | |
| | | | | | | | L0756: 4, L0780: 4, | | |
| | | | | | | | L0752: 4, L0591: 4, | | |
| | | | | | | | H0423: 4, H0341: 3, | | |
| | | | | | | | S0360: 3, H0369: 3, | | |
| | | | | | | | H0156: 3, L0435: 3, | | |
| | | | | | | | L0769: 3, L0775: 3, | | |
| | | | | | | | L0809: 3, L0666: 3, | | |
| | | | | | | | H0547: 3, S0328: 3, | | |
| | | | | | | | H0521: 3, L0747: 3, | | |
| | | | | | | | L0750: 3, H0543: 3, | | |
| | | | | | | | H0171: 2, S0442: 2, | | |
| | | | | | | | S0354: 2, S0358: 2, | | |
| | | | | | | | S0132: 2, S0278: 2, | | |
| | | | | | | | H0497: 2, T0039: 2, | | |
| | | | | | | | H0706: 2, H0036: 2, | | |
| | | | | | | | S0474: 2, H0596: 2, | | |
| | | | | | | | H0009: 2, H0375: 2, | | |
| | | | | | | | S6028: 2, H0266: 2, | | |
| | | | | | | | S0214: 2, H0328: 2, | | |
| | | | | | | | H0622: 2, H0644: 2, | | |
| | | | | | | | H0591: 2, H0413: 2, | | |
| | | | | | | | T0041: 2, L0770: 2, | | |
| | | | | | | | L0796: 2, L0363: 2, | | |
| | | | | | | | L0806: 2, L0659: 2, | | |
| | | | | | | | L0542: 2, L0783: 2, | | |
| | | | | | | | L0791: 2, L0665: 2, | | |
| | | | | | | | L3811: 2, H0518: 2, | | |
| | | | | | | | S3014: 2, S0028: 2, | | |
| | | | | | | | H0595: 2, S0434: 2, | | |
| | | | | | | | S0436: 2, L0589: 2, | | |
| | | | | | | | L0604: 2, L0601: 2, | | |
| | | | | | | | H0542: 2, S0424: 2, | | |
| | | | | | | | L0411: 1, H0624: 1, | | |
| | | | | | | | H0170: 1, L0615: 1, | | |
| | | | | | | | H0265: 1, S0342: 1, | | |
| | | | | | | | S6024: 1, S0134: 1, | | |
| | | | | | | | H0657: 1, S0212: 1, | | |
| | | | | | | | H0450: 1, S0420: 1, | | |
| | | | | | | | L0005: 1, S0444: 1, | | |
| | | | | | | | H0580: 1, H0741: 1, | | |
| | | | | | | | S0045: 1, S0476: 1, | | |
| | | | | | | | H0393: 1, H0550: 1, | | |
| | | | | | | | H0441: 1, H0370: 1, | | |
| | | | | | | | H0600: 1, H0586: 1, | | |
| | | | | | | | H0587: 1, H0486: 1, | | |
| | | | | | | | H0250: 1, H0635: 1, | | |
| | | | | | | | L0021: 1, S0182: 1, | | |
| | | | | | | | L0563: 1, H0052: 1, | | |
| | | | | | | | H0309: 1, H0046: 1, | | |
| | | | | | | | L0157: 1, H0566: 1, | | |
| | | | | | | | H0081: 1, H0050: 1, | | |
| | | | | | | | H0057: 1, S0051: 1, | | |
| | | | | | | | S0318: 1, S0316: 1, | | |
| | | | | | | | H0687: 1, S0250: 1, | | |
| | | | | | | | H0615: 1, H0428: 1, | | |
| | | | | | | | H0039: 1, L0483: 1, | | |
| | | | | | | | H0553: 1, L0055: 1, | | |
| | | | | | | | H0032: 1, H0673: 1, | | |
| | | | | | | | S0366: 1, H0038: 1, | | |
| | | | | | | | H0634: 1, H0380: 1, | | |
| | | | | | | | H0488: 1, H0623: 1, | | |
| | | | | | | | H0059: 1, S0112: 1, | | |
| | | | | | | | L0351: 1, H0641: 1, | | |
| | | | | | | | H0646: 1, S0344: 1, | | |
| | | | | | | | S0002: 1, 50426: 1, | | |
| | | | | | | | L0638: 1, L4747: 1, | | |
| | | | | | | | L0761: 1, L0627: 1, | | |
| | | | | | | | L0372: 1, L0646: 1, | | |
| | | | | | | | L0374: 1, L0644: 1, | | |
| | | | | | | | L0771: 1, L0767: 1, | | |
| | | | | | | | L0768: 1, L0549: 1, | | |
| | | | | | | | L0550: 1, L0533: 1, | | |
| | | | | | | | L0804: 1, L0650: 1, | | |
| | | | | | | | L0375: 1, L0651: 1, | | |
| | | | | | | | L0523: 1, L0655: 1, | | |
| | | | | | | | L0782: 1, L0790: 1, | | |
| | | | | | | | L0663: 1, L0664: 1, | | |
| | | | | | | | S0148: 1, L0352: 1, | | |
| | | | | | | | H0520: 1, H0519: 1, | | |
| | | | | | | | S0126: 1, H0672: 1, | | |
| | | | | | | | H0754: 1, S0152: 1, | | |
| | | | | | | | H0522: 1, H0696: 1, | | |
| | | | | | | | S0044: 1, S0406: 1, | | |
| | | | | | | | L0612: 1, S3012: 1, | | |
| | | | | | | | L0746: 1, L0786: 1, | | |
| | | | | | | | L0759: 1, H0445: 1, | | |
| | | | | | | | L0684: 1, L0608: 1, | | |
| | | | | | | | H0667: 1, S0276: 1 and | | |
| | | | | | | | H0422: 1. | | |
| 35 | HEBFR46 | 847064 | 45 | 200-289 | 152 | Met-1 to Thr-6. | H0457: 10, H0550: 5, | 7 | |
| | | | | | | | H0436: 5, H0549: 4, | | |
| | | | | | | | H0616: 4, L0519: 4, | | |
| | | | | | | | H0556: 3, H0580: 3, | | |
| | | | | | | | S0007: 3, S0046: 3, | | |
| | | | | | | | L0809: 3, L0747: 3, | | |
| | | | | | | | L0777: 3, S0436: 3, | | |
| | | | | | | | H0295: 2, T0040: 2, | | |
| | | | | | | | H0266: 2, L0761: 2, | | |
| | | | | | | | L0783: 2, L0789: 2, | | |
| | | | | | | | H0658: 2, H0521: 2, | | |
| | | | | | | | L0753: 2, L0731: 2, | | |
| | | | | | | | L0596: 2, H0543: 2, | | |
| | | | | | | | S0040: 1, S0116: 1, | | |
| | | | | | | | S0282: 1, H0662: 1, | | |
| | | | | | | | H0402: 1, H0125: 1, | | |
| | | | | | | | L0534: 1, L0562: 1, | | |
| | | | | | | | S0356: 1, S0358: 1, | | |
| | | | | | | | H0749: 1, L3816: 1, | | |
| | | | | | | | H0559: 1, H0069: 1, | | |
| | | | | | | | H0599: 1, H0618: 1, | | |
| | | | | | | | H0253: 1, H0581: 1, | | |
| | | | | | | | H0546: 1, H0123: 1, | | |
| | | | | | | | S0051: 1, H0083: 1, | | |
| | | | | | | | H0687: 1, H0284: 1, | | |
| | | | | | | | H0124: 1, H0038: 1, | | |
| | | | | | | | H0551: 1, H0623: 1, | | |
| | | | | | | | S0038: 1, T0041: 1, | | |
| | | | | | | | S0440: 1, S0150: 1, | | |
| | | | | | | | L3818: 1, S0002: 1, | | |
| | | | | | | | L0763: 1, L0769: 1, | | |
| | | | | | | | L5575: 1, L0627: 1, | | |
| | | | | | | | L0800: 1, L0662: 1, | | |
| | | | | | | | L0803: 1, L0793: 1, | | |
| | | | | | | | L0666: 1, L2264: 1, | | |
| | | | | | | | L3825: 1, L3827: 1, | | |
| | | | | | | | L3828: 1, H0547: 1, | | |
| | | | | | | | H0519: 1, H0539: 1, | | |
| | | | | | | | S0037: 1, S0206: 1, | | |
| | | | | | | | L0748: 1, L0749: 1, | | |
| | | | | | | | H0595: 1, L0593: 1, | | |
| | | | | | | | S0194: 1 and S0276: 1. | | |
| 36 | HEOMC46 | 866171 | 46 | 154-309 | 153 | Ser-5 to Thr-10, | H0749: 2, H0581: 2, | | |
| | | | | | | Cys-36 to Glu-51. | H0457: 2 and S0116: 1. | | |
| 37 | HFCDW95 | 847383 | 47 | 151-159 | 154 | | L0766: 9, L0803: 8, | 7 | |
| | | | | | | | H0341: 7, H0521: 7, | | |
| | | | | | | | L0770: 6, L0771: 6, | | |
| | | | | | | | L0754: 6, L0752: 6, | | |
| | | | | | | | L0731: 6, S0354: 5, | | |
| | | | | | | | S0422: 5, L0662: 5, | | |
| | | | | | | | H0519: 5, L0439: 5, | | |
| | | | | | | | L0779: 5, L0758: 5, | | |
| | | | | | | | S0436: 5, H0009: 4, | | |
| | | | | | | | H0673: 4, L0800: 4, | | |
| | | | | | | | L0521: 4, L0805: 4, | | |
| | | | | | | | L0659: 4, L0809: 4, | | |
| | | | | | | | L0438: 4, S0028: 4, | | |
| | | | | | | | L0485: 4, L0601: 4, | | |
| | | | | | | | H0657: 3, H0638: 3, | | |
| | | | | | | | S0418: 3, H0733: 3, | | |
| | | | | | | | S0007: 3, S0222: 3, | | |
| | | | | | | | L3655: 3, S0214: 3, | | |
| | | | | | | | H0529: 3, L0369: 3, | | |
| | | | | | | | L0794: 3, L0649: 3, | | |
| | | | | | | | L0776: 3, L0665: 3, | | |
| | | | | | | | L3391: 3, H0144: 3, | | |
| | | | | | | | H0670: 3, S0406: 3, | | |
| | | | | | | | L0756: 3, L0755: 3, | | |
| | | | | | | | L0759: 3, H0667: 3, | | |
| | | | | | | | S0420: 2, S0358: 2, | | |
| | | | | | | | S0360: 2, H0580: 2, | | |
| | | | | | | | H0729: 2, S0476: 2, | | |
| | | | | | | | H0645: 2, S6026: 2, | | |
| | | | | | | | S0300: 2, L2543: 2, | | |
| | | | | | | | H0156: 2, S0010: 2, | | |
| | | | | | | | H0085: 2, H0178: 2, | | |
| | | | | | | | H0375: 2, S6028: 2, | | |
| | | | | | | | H0266: 2, S0003: 2, | | |
| | | | | | | | H0428: 2, H0169: 2, | | |
| | | | | | | | S0036: 2, H0090: 2, | | |
| | | | | | | | H0634: 2, L0640: 2, | | |
| | | | | | | | L0769: 2, L0637: 2, | | |
| | | | | | | | L0761: 2, L0646: 2, | | |
| | | | | | | | L0774: 2, L0775: 2, | | |
| | | | | | | | L0806: 2, L0807: 2, | | |
| | | | | | | | L0783: 2, L5622: 2, | | |
| | | | | | | | L0666: 2, L2653: 2, | | |
| | | | | | | | L2264: 2, H0725: 2, | | |
| | | | | | | | L3827: 2, H0547: 2, | | |
| | | | | | | | H0435: 2, H0659: 2, | | |
| | | | | | | | S0380: 2, S3014: 2, | | |
| | | | | | | | S0206: 2, L0740: 2, | | |
| | | | | | | | L0753: 2, L0757: 2, | | |
| | | | | | | | S0434: 2, L0596: 2, | | |
| | | | | | | | H0668: 2, H0542: 2, | | |
| | | | | | | | H0170: 1, H0556: 1, | | |
| | | | | | | | S0342: 1, H0713: 1, | | |
| | | | | | | | H0717: 1, H0716: 1, | | |
| | | | | | | | H0294: 1, L2877: 1, | | |
| | | | | | | | T0049: 1, S0218: 1, | | |
| | | | | | | | L2910: 1, L2915: 1, | | |
| | | | | | | | L2991: 1, S0282: 1, | | |
| | | | | | | | S0400: 1, L2289: 1, | | |
| | | | | | | | H0241: 1, H0402: 1, | | |
| | | | | | | | L0534: 1, L0539: 1, | | |
| | | | | | | | S0376: 1, S0444: 1, | | |
| | | | | | | | S0410: 1, H0329: 1, | | |
| | | | | | | | H0722: 1, H0728: 1, | | |
| | | | | | | | H0734: 1, S0045: 1, | | |
| | | | | | | | H0749: 1, H0406: 1, | | |
| | | | | | | | H0411: 1, H0443: 1, | | |
| | | | | | | | S0220: 1, H0441: 1, | | |
| | | | | | | | H0415: 1, H0438: 1, | | |
| | | | | | | | H0362: 1, H0333: 1, | | |
| | | | | | | | H0574: 1, L0623: 1, | | |
| | | | | | | | H0486: 1, L1819: 1, | | |
| | | | | | | | T0060: 1, H0013: 1, | | |
| | | | | | | | H0427: 1, H0599: 1, | | |
| | | | | | | | H0575: 1, H0318: 1, | | |
| | | | | | | | S0474: 1, H0581: 1, | | |
| | | | | | | | H0374: 1, T0110: 1, | | |
| | | | | | | | H0150: 1, H0563: 1, | | |
| | | | | | | | H0050: 1, H0014: 1, | | |
| | | | | | | | S0388: 1, S0051: 1, | | |
| | | | | | | | H0687: 1, H0039: 1, | | |
| | | | | | | | H0030: 1, H0553: 1, | | |
| | | | | | | | H0644: 1, H0628: 1, | | |
| | | | | | | | H0166: 1, L0455: 1, | | |
| | | | | | | | H0708: 1, S0366: 1, | | |
| | | | | | | | H0591: 1, H0038: 1, | | |
| | | | | | | | H0551: 1, H0380: 1, | | |
| | | | | | | | H0623: 1, S0386: 1, | | |
| | | | | | | | T0042: 1, H0494: 1, | | |
| | | | | | | | H0561: 1, S0370: 1, | | |
| | | | | | | | H0509: 1, H0130: 1, | | |
| | | | | | | | H0641: 1, L0598: 1, | | |
| | | | | | | | L0763: 1, L0638: 1, | | |
| | | | | | | | L0796: 1, L0667: 1, | | |
| | | | | | | | L0630: 1, L0373: 1, | | |
| | | | | | | | L0641: 1, L0773: 1, | | |
| | | | | | | | L5569: 1, L5574: 1, | | |
| | | | | | | | L0381: 1, L0655: 1, | | |
| | | | | | | | L0607: 1, L0661: 1, | | |
| | | | | | | | L0527: 1, L0518: 1, | | |
| | | | | | | | L5623: 1, L0787: 1, | | |
| | | | | | | | L0789: 1, L0790: 1, | | |
| | | | | | | | L0792: 1, L0793: 1, | | |
| | | | | | | | L0710: 1, L2262: 1, | | |
| | | | | | | | L2380: 1, L2412: 1, | | |
| | | | | | | | S0374: 1, H0520: 1, | | |
| | | | | | | | S0126: 1, H0648: 1, | | |
| | | | | | | | H0710: 1, H0522: 1, | | |
| | | | | | | | H0696: 1, H0555: 1, | | |
| | | | | | | | H0436: 1, S0392: 1, | | |
| | | | | | | | S3012: 1, L0742: 1, | | |
| | | | | | | | L0745: 1, L0747: 1, | | |
| | | | | | | | L0749: 1, L0777: 1, | | |
| | | | | | | | L0593: 1, L0366: 1, | | |
| | | | | | | | S0026: 1, S0242: 1, | | |
| | | | | | | | S0276: 1, S0196: 1, | | |
| | | | | | | | H0543: 1, H0423: 1, | | |
| | | | | | | | S0460: 1, L3357: 1 and | | |
| | | | | | | | L3372: 1. | | |
| 38 | HFEBO17 | 852218 | 48 | 136-219 | 155 | | L0803: 4, L0438: 4, | | |
| | | | | | | | L0766: 2, L0526: 2, | | |
| | | | | | | | H0659: 2, S0444: 1, | | |
| | | | | | | | S0408: 1, H0421: 1, | | |
| | | | | | | | H0081: 1, H0050: 1, | | |
| | | | | | | | S0370: 1, L0770: 1, | | |
| | | | | | | | L0637: 1, L0646: 1, | | |
| | | | | | | | L0800: 1, L0662: 1, | | |
| | | | | | | | L0804: 1, L0607: 1, | | |
| | | | | | | | L0659: 1, L0790: 1, | | |
| | | | | | | | L0665: 1, L0352: 1, | | |
| | | | | | | | H0648: 1, H0651: 1, | | |
| | | | | | | | S0328: 1, H0436: 1, | | |
| | | | | | | | L0749: 1, L0750: 1, | | |
| | | | | | | | L0777: 1, L0752: 1, | | |
| | | | | | | | L0599: 1, S0242: 1 and | | |
| | | | | | | | H0422: 1. | | |
| 39 | HFIJA29 | 839206 | 49 | 175-423 | 156 | Ser-36 to Ser-42, | L0766: 20, L0754: 10, | 6, 7 | |
| | | | | | | Lys-54 to Ser-69. | L0776: 8, L0803: 5, | | |
| | | | | | | | L0749: 5, H0661: 4, | | |
| | | | | | | | L0740: 4, L0751: 4, | | |
| | | | | | | | L0608: 4, L0770: 3, | | |
| | | | | | | | L0750: 3, L0761: 2, | | |
| | | | | | | | L0794: 2, L0806: 2, | | |
| | | | | | | | L0783: 2, L0809: 2, | | |
| | | | | | | | L0789: 2, L0438: 2, | | |
| | | | | | | | S0404: 2, L0745: 2, | | |
| | | | | | | | L0777: 2, L0755: 2, | | |
| | | | | | | | L0758: 2, S0134: 1, | | |
| | | | | | | | H0638: 1, S0358: 1, | | |
| | | | | | | | S0408: 1, S0045: 1, | | |
| | | | | | | | S0046: 1, H0581: 1, | | |
| | | | | | | | H0023: 1, H0355: 1, | | |
| | | | | | | | S0214: 1, L0055: 1, | | |
| | | | | | | | H0477: 1, L0796: 1, | | |
| | | | | | | | L3905: 1, L0772: 1, | | |
| | | | | | | | L0646: 1, L0800: 1, | | |
| | | | | | | | L0642: 1, L0764: 1, | | |
| | | | | | | | L0773: 1, L0363: 1, | | |
| | | | | | | | L0768: 1, L0804: 1, | | |
| | | | | | | | L0774: 1, L0805: 1, | | |
| | | | | | | | L0655: 1, L0807: 1, | | |
| | | | | | | | L0526: 1, L0531: 1, | | |
| | | | | | | | H0689: 1, S0378: 1, | | |
| | | | | | | | S0152: 1, S0406: 1, | | |
| | | | | | | | H0732: 1, L0742: 1, | | |
| | | | | | | | L0748: 1, L0747: 1, | | |
| | | | | | | | L0753: 1, L0757: 1, | | |
| | | | | | | | S0194: 1, H0422: 1 and | | |
| | | | | | | | S0424: 1. | | |
| 40 | HFKFX64 | 566835 | 50 | 127-171 | 157 | | H0012: 3 and L0809: 1. | 18, N/A | |
| 41 | HGBER72 | 826710 | 51 | 43-102 | 158 | | L0766: 12, H0436: 9, | 9 | |
| | | | | | | | H0543: 8, L0769: 6, | | |
| | | | | | | | L0749: 6, L0731: 6, | | |
| | | | | | | | H0556: 5, L0655: 5, | | |
| | | | | | | | S0434: 5, L0439: 4, | | |
| | | | | | | | L0758: 4, S0114: 3, | | |
| | | | | | | | H0255: 3, L3904: 3, | | |
| | | | | | | | L0794: 3, L0776: 3, | | |
| | | | | | | | L0659: 3, L0783: 3, | | |
| | | | | | | | L0809: 3, L0751: 3, | | |
| | | | | | | | H0423: 3, S0358: 2, | | |
| | | | | | | | S0360: 2, S0007: 2, | | |
| | | | | | | | H0549: 2, H0550: 2, | | |
| | | | | | | | H0486: 2, H0014: 2, | | |
| | | | | | | | S0388: 2, H0424: 2, | | |
| | | | | | | | H0031: 2, H0628: 2, | | |
| | | | | | | | L5575: 2, L0771: 2, | | |
| | | | | | | | L0662: 2, L0791: 2, | | |
| | | | | | | | L0793: 2, L2265: 2, | | |
| | | | | | | | L0438: 2, S0328: 2, | | |
| | | | | | | | L0740: 2, L0756: 2, | | |
| | | | | | | | H0265: 1, H0686: 1, | | |
| | | | | | | | S0134: 1, H0657: 1, | | |
| | | | | | | | H0656: 1, S0001: 1, | | |
| | | | | | | | S0418: 1, L0619: 1, | | |
| | | | | | | | S0442: 1, S0408: 1, | | |
| | | | | | | | H0730: 1, H0749: 1, | | |
| | | | | | | | H0619: 1, H0351: 1, | | |
| | | | | | | | S0222: 1, H0592: 1, | | |
| | | | | | | | H0586: 1, T0060: 1, | | |
| | | | | | | | H0250: 1, H0618: 1, | | |
| | | | | | | | H0318: 1, H0052: 1, | | |
| | | | | | | | H0251: 1, H0545: 1, | | |
| | | | | | | | H0569: 1, H0012: 1, | | |
| | | | | | | | H0201: 1, S6028: 1, | | |
| | | | | | | | H0288: 1, H0622: 1, | | |
| | | | | | | | T0023: 1, L0483: 1, | | |
| | | | | | | | H0604: 1, S0036: 1, | | |
| | | | | | | | H0135: 1, H0040: 1, | | |
| | | | | | | | H0264: 1, S0039: 1, | | |
| | | | | | | | L0640: 1, L0763: 1, | | |
| | | | | | | | L0770: 1, L0761: 1, | | |
| | | | | | | | L0648: 1, L0521: 1, | | |
| | | | | | | | L0533: 1, L0774: 1, | | |
| | | | | | | | L0775: 1, L0376: 1, | | |
| | | | | | | | L0378: 1, L0629: 1, | | |
| | | | | | | | L5623: 1, L0666: 1, | | |
| | | | | | | | L0664: 1, S0310: 1, | | |
| | | | | | | | L3811: 1, H0689: 1, | | |
| | | | | | | | H0659: 1, H0660: 1, | | |
| | | | | | | | H0648: 1, H0696: 1, | | |
| | | | | | | | H0576: 1, S0028: 1, | | |
| | | | | | | | L0742: 1, L0750: 1, | | |
| | | | | | | | L0779: 1, L0777: 1, | | |
| | | | | | | | L0752: 1, L0591: 1, | | |
| | | | | | | | L0601: 1, H0542: 1 and | | |
| | | | | | | | H0506: 1. | | |
| 42 | HGBGN34 | 648659 | 52 | 280-426 | 159 | Asn-2 to Val-8. | L0747: 5, H0716: 2, | | |
| | | | | | | | H0427: 2, S0280: 2, | | |
| | | | | | | | H0662: 1, S0444: 1, | | |
| | | | | | | | H0441: 1, H0492: 1, | | |
| | | | | | | | T0001: 1, H0014: 1, | | |
| | | | | | | | H0030: 1, H0674: 1, | | |
| | | | | | | | L5575: 1, L0659: 1, | | |
| | | | | | | | S0330: 1, L0752: 1 and | | |
| | | | | | | | S0436: 1. | | |
| 43 | HGLBG15 | 701990 | 53 | 191-271 | 160 | | L0803: 19, S0474: 17, | 7 | |
| | | | | | | | L0748: 13, S0408: 11, | | |
| | | | | | | | H0351: 11, L2669: 11, | | |
| | | | | | | | L2504: 10, L0770: 10, | | |
| | | | | | | | L0805: 9, L0439: 9, | | |
| | | | | | | | L0754: 9, S0422: 8, | | |
| | | | | | | | L0809: 8, L0794: 6, | | |
| | | | | | | | L0755: 6, L0731: 6, | | |
| | | | | | | | L0758: 6, S0360: 5, | | |
| | | | | | | | H0265: 4, S0414: 4, | | |
| | | | | | | | H0581: 4, H0271: 4, | | |
| | | | | | | | L0771: 4, L0804: 4, | | |
| | | | | | | | L0776: 4, L0659: 4, | | |
| | | | | | | | L0666: 4, L0749: 4, | | |
| | | | | | | | L0591: 4, H0327: 3, | | |
| | | | | | | | L0806: 3, L0655: 3, | | |
| | | | | | | | L0636: 3, L0565: 3, | | |
| | | | | | | | H0436: 3, L0777: 3, | | |
| | | | | | | | S0434: 3, S0436: 3, | | |
| | | | | | | | S0412: 3, S0116: 2, | | |
| | | | | | | | S0212: 2, H0661: 2, | | |
| | | | | | | | S0358: 2, S0132: 2, | | |
| | | | | | | | L3388: 2, S0222: 2, | | |
| | | | | | | | H0123: 2, H0266: 2, | | |
| | | | | | | | S0003: 2, H0031: 2, | | |
| | | | | | | | H0551: 2, L0598: 2, | | |
| | | | | | | | L0638: 2, L0662: 2, | | |
| | | | | | | | L0766: 2, L0650: 2, | | |
| | | | | | | | L0664: 2, L0665: 2, | | |
| | | | | | | | S0374: 2, H0547: 2, | | |
| | | | | | | | H0435: 2, H0660: 2, | | |
| | | | | | | | S0378: 2, L0740: 2, | | |
| | | | | | | | L0750: 2, L0756: 2, | | |
| | | | | | | | L0752: 2, H0624: 1, | | |
| | | | | | | | H0556: 1, S0040: 1, | | |
| | | | | | | | H0295: 1, S0114: 1, | | |
| | | | | | | | H0656: 1, L2904: 1, | | |
| | | | | | | | S0001: 1, H0671: 1, | | |
| | | | | | | | S0356: 1, S0442: 1, | | |
| | | | | | | | S0376: 1, S0444: 1, | | |
| | | | | | | | H0675: 1, H0730: 1, | | |
| | | | | | | | H0741: 1, H0208: 1, | | |
| | | | | | | | S0045: 1, S0476: 1, | | |
| | | | | | | | H0393: 1, H0550: 1, | | |
| | | | | | | | H0431: 1, H0586: 1, | | |
| | | | | | | | H0642: 1, L3499: 1, | | |
| | | | | | | | H0013: 1, H0069: 1, | | |
| | | | | | | | H0635: 1, H0427: 1, | | |
| | | | | | | | H0156: 1, L0021: 1, | | |
| | | | | | | | H0042: 1, T0082: 1, | | |
| | | | | | | | H0590: 1, S0010: 1, | | |
| | | | | | | | H0318: 1, H0251: 1, | | |
| | | | | | | | H0596: 1, L0040: 1, | | |
| | | | | | | | H0545: 1, H0457: 1, | | |
| | | | | | | | H0009: 1, N0006: 1, | | |
| | | | | | | | L0471: 1, H0024: 1, | | |
| | | | | | | | H0051: 1, H0083: 1, | | |
| | | | | | | | H0061: 1, S0316: 1, | | |
| | | | | | | | H0687: 1, H0688: 1, | | |
| | | | | | | | H0644: 1, H0617: 1, | | |
| | | | | | | | H0591: 1, H0038: 1, | | |
| | | | | | | | H0040: 1, H0616: 1, | | |
| | | | | | | | H0264: 1, H0100: 1, | | |
| | | | | | | | H0561: 1, S0440: 1, | | |
| | | | | | | | L2270: 1, S0426: 1, | | |
| | | | | | | | H0529: 1, L0763: 1, | | |
| | | | | | | | L0637: 1, L0761: 1, | | |
| | | | | | | | L0373: 1, L0646: 1, | | |
| | | | | | | | L0800: 1, L0764: 1, | | |
| | | | | | | | L0626: 1, L0653: 1, | | |
| | | | | | | | L0606: 1, L0661: 1, | | |
| | | | | | | | L0515: 1, L5622: 1, | | |
| | | | | | | | L0789: 1, L0792: 1, | | |
| | | | | | | | L0793: 1, L0663: 1, | | |
| | | | | | | | L2653: 1, L2257: 1, | | |
| | | | | | | | L2259: 1, L2261: 1, | | |
| | | | | | | | L2654: 1, H0144: 1, | | |
| | | | | | | | L0438: 1, H0520: 1, | | |
| | | | | | | | H0519: 1, H0659: 1, | | |
| | | | | | | | H0658: 1, S0328: 1, | | |
| | | | | | | | S0330: 1, S0380: 1, | | |
| | | | | | | | H0710: 1, H0521: 1, | | |
| | | | | | | | H0522: 1, H0696: 1, | | |
| | | | | | | | S0044: 1, S0406: 1, | | |
| | | | | | | | S0027: 1, L0742: 1, | | |
| | | | | | | | L0744: 1, L0751: 1, | | |
| | | | | | | | L0745: 1, L0747: 1, | | |
| | | | | | | | L0779: 1, L0780: 1, | | |
| | | | | | | | L0757: 1, L0759: 1, | | |
| | | | | | | | S0031: 1, S0260: 1, | | |
| | | | | | | | L0596: 1, L0605: 1, | | |
| | | | | | | | L0595: 1, S0026: 1, | | |
| | | | | | | | S0192: 1, S0242: 1, | | |
| | | | | | | | H0542: 1, H0543: 1, | | |
| | | | | | | | S0042: 1 and S0462: 1. | | |
| 44 | HHFEC39 | 609873 | 54 | 1211-1216 | 161 | | L0805: 21, L0776: 19, | 6 | |
| | | | | | | | L0751: 14, L0759: 13, | | |
| | | | | | | | L0770: 11, H0615: 8, | | |
| | | | | | | | L0803: 8, L0438: 7, | | |
| | | | | | | | L0439: 7, L0758: 7, | | |
| | | | | | | | L0769: 6, L0521: 6, | | |
| | | | | | | | L0754: 6, H0624: 5, | | |
| | | | | | | | L0486: 5, L0500: 5, | | |
| | | | | | | | L0807: 5, L0740: 5, | | |
| | | | | | | | L0591: 5, H0716: 4, | | |
| | | | | | | | H0351: 4, L0774: 4, | | |
| | | | | | | | H0144: 4, S0328: 4, | | |
| | | | | | | | L0748: 4, L0745: 4, | | |
| | | | | | | | L0604: 4, S0414: 3, | | |
| | | | | | | | H0013: 3, S0250: 3, | | |
| | | | | | | | H0428: 3, H0644: 3, | | |
| | | | | | | | H0591: 3, L0659: 3, | | |
| | | | | | | | L0783: 3, L0809: 3, | | |
| | | | | | | | L0791: 3, L0793: 3, | | |
| | | | | | | | L0666: 3, H0670: 3, | | |
| | | | | | | | L0779: 3, L0777: 3, | | |
| | | | | | | | L0731: 3, H0583: 2, | | |
| | | | | | | | S0408: 2, L0717: 2, | | |
| | | | | | | | S0280: 2, S0010: 2, | | |
| | | | | | | | H0052: 2, H0024: 2, | | |
| | | | | | | | T0010: 2, H0594: 2, | | |
| | | | | | | | H0266: 2, H0031: 2, | | |
| | | | | | | | H0032: 2, T0067: 2, | | |
| | | | | | | | L0796: 2, L0662: 2, | | |
| | | | | | | | L0794: 2, L0806: 2, | | |
| | | | | | | | L0518: 2, L0792: 2, | | |
| | | | | | | | L3643: 1, S0342: 1, | | |
| | | | | | | | L0002: 1, H0657: 1, | | |
| | | | | | | | H0255: 1, H0305: 1, | | |
| | | | | | | | H0728: 1, H0733: 1, | | |
| | | | | | | | H0734: 1, S0007: 1, | | |
| | | | | | | | H0645: 1, H0640: 1, | | |
| | | | | | | | H0369: 1, H0261: 1, | | |
| | | | | | | | H0549: 1, H0550: 1, | | |
| | | | | | | | S0222: 1, H0586: 1, | | |
| | | | | | | | T0040: 1, L3655: 1, | | |
| | | | | | | | L0021: 1, L0022: 1, | | |
| | | | | | | | L0105: 1, T0071: 1, | | |
| | | | | | | | L0109: 1, H0194: 1, | | |
| | | | | | | | H0263: 1, H0566: 1, | | |
| | | | | | | | H0050: 1, L0471: 1, | | |
| | | | | | | | H0051: 1, S0051: 1, | | |
| | | | | | | | S0024: 1, H0355: 1, | | |
| | | | | | | | H0510: 1, H0271: 1, | | |
| | | | | | | | H0328: 1, H0039: 1, | | |
| | | | | | | | H0622: 1, L0483: 1, | | |
| | | | | | | | H0124: 1, S0036: 1, | | |
| | | | | | | | H0038: 1, H0616: 1, | | |
| | | | | | | | H0412: 1, H0059: 1, | | |
| | | | | | | | H0100: 1, H0646: 1, | | |
| | | | | | | | S0422: 1, S0002: 1, | | |
| | | | | | | | H0743: 1, H0529: 1, | | |
| | | | | | | | L0520: 1, L0640: 1, | | |
| | | | | | | | L0763: 1, L0773: 1, | | |
| | | | | | | | L0364: 1, L0649: 1, | | |
| | | | | | | | L0497: 1, L0526: 1, | | |
| | | | | | | | L0788: 1, L0789: 1, | | |
| | | | | | | | L0663: 1, L0665: 1, | | |
| | | | | | | | S0374: 1, H0780: 1, | | |
| | | | | | | | H0547: 1, S0126: 1, | | |
| | | | | | | | H0689: 1, H0648: 1, | | |
| | | | | | | | S0330: 1, S0378: 1, | | |
| | | | | | | | H0522: 1, S0037: 1, | | |
| | | | | | | | L0747: 1, L0750: 1, | | |
| | | | | | | | L0780: 1, L0752: 1, | | |
| | | | | | | | H0595: 1, S0434: 1, | | |
| | | | | | | | L0608: 1, L0594: 1, | | |
| | | | | | | | L0361: 1, L0603: 1, | | |
| | | | | | | | S0026: 1, S0192: 1, | | |
| | | | | | | | S0194: 1, H0423: 1, | | |
| | | | | | | | S0398: 1, S0460: 1, | | |
| | | | | | | | H0506: 1, H0008: 1 and | | |
| | | | | | | | H0352: 1. | | |
| 45 | HHSDI53 | 862028 | 55 | 221-295 | 162 | | L0766: 10, L0752: 8, | 1, 18 | |
| | | | | | | | L0439: 6, L0747: 6, | | |
| | | | | | | | L0740: 5, L0756: 5, | | |
| | | | | | | | S0408: 4, L0779: 4, | | |
| | | | | | | | L0777: 4, L0731: 4, | | |
| | | | | | | | S0051: 3, H0169: 3, | | |
| | | | | | | | L0803: 3, L0774: 3, | | |
| | | | | | | | L0809: 3, L0754: 3, | | |
| | | | | | | | S0360: 2, H0574: 2, | | |
| | | | | | | | S0422: 2, L0763: 2, | | |
| | | | | | | | L0805: 2, L0666: 2, | | |
| | | | | | | | L0663: 2, L0751: 2, | | |
| | | | | | | | L0755: 2, L0759: 2, | | |
| | | | | | | | L0601: 2, H0624: 1, | | |
| | | | | | | | S0040: 1, H0713: 1, | | |
| | | | | | | | S0114: 1, S0298: 1, | | |
| | | | | | | | S0420: 1, S0444: 1, | | |
| | | | | | | | H0580: 1, H0730: 1, | | |
| | | | | | | | H0733: 1, L3388: 1, | | |
| | | | | | | | H0351: 1, H0600: 1, | | |
| | | | | | | | H0331: 1, H0013: 1, | | |
| | | | | | | | L0021: 1, H0575: 1, | | |
| | | | | | | | H0590: 1, T0110: 1, | | |
| | | | | | | | H0012: 1, H0615: 1, | | |
| | | | | | | | H0031: 1, H0553: 1, | | |
| | | | | | | | H0591: 1, S0440: 1, | | |
| | | | | | | | H0646: 1, S0002: 1, | | |
| | | | | | | | L0772: 1, L0645: 1, | | |
| | | | | | | | L0773: 1, L0662: 1, | | |
| | | | | | | | L0794: 1, L0381: 1, | | |
| | | | | | | | L0775: 1, L0776: 1, | | |
| | | | | | | | L0657: 1, L0659: 1, | | |
| | | | | | | | L0528: 1, L5622: 1, | | |
| | | | | | | | L0790: 1, H0547: 1, | | |
| | | | | | | | H0648: 1, H0539: 1, | | |
| | | | | | | | S0152: 1, H0696: 1, | | |
| | | | | | | | S0044: 1, S0406: 1, | | |
| | | | | | | | S0028: 1, L0758: 1, | | |
| | | | | | | | S0434: 1, S0436: 1, | | |
| | | | | | | | L0366: 1, S0011: 1, | | |
| | | | | | | | S0398: 1 and S0424: 1. | | |
| 46 | HISBA38 | 561711 | 56 | 169-279 | 163 | | L0766: 3, H0318: 1 and | 9 | |
| | | | | | | | H0539: 1. | | |
| 47 | HJPBK28 | 638191 | 57 | 256-387 | 164 | | L0794: 6, L0439: 5, | | |
| | | | | | | | L0759: 5, H0556: 4, | | |
| | | | | | | | L0771: 4, L0770: 3, | | |
| | | | | | | | L0643: 3, H0144: 3, | | |
| | | | | | | | H0156: 2, H0188: 2, | | |
| | | | | | | | H0090: 2, H0641: 2, | | |
| | | | | | | | L0662: 2, L0766: 2, | | |
| | | | | | | | L0803: 2, L0776: 2, | | |
| | | | | | | | L0661: 2, L0659: 2, | | |
| | | | | | | | L0790: 2, H0522: 2, | | |
| | | | | | | | S0436: 2, H0295: 1, | | |
| | | | | | | | T0049: 1, H0583: 1, | | |
| | | | | | | | S0116: 1, H0663: 1, | | |
| | | | | | | | H0662: 1, S0356: 1, | | |
| | | | | | | | S0376: 1, S0132: 1, | | |
| | | | | | | | H0586: 1, H0587: 1, | | |
| | | | | | | | H0486: 1, H0575: 1, | | |
| | | | | | | | H0748: 1, H0744: 1, | | |
| | | | | | | | H0309: 1, H0231: 1, | | |
| | | | | | | | H0083: 1, H0271: 1, | | |
| | | | | | | | H0286: 1, H0622: 1, | | |
| | | | | | | | H0031: 1, L0455: 1, | | |
| | | | | | | | H0068: 1, H0063: 1, | | |
| | | | | | | | H0551: 1, H0264: 1, | | |
| | | | | | | | H0268: 1, T0041: 1, | | |
| | | | | | | | H0494: 1, H0633: 1, | | |
| | | | | | | | L0637: 1, L3905: 1, | | |
| | | | | | | | L0800: 1, L0775: 1, | | |
| | | | | | | | L0806: 1, L0383: 1, | | |
| | | | | | | | L0809: 1, L0666: 1, | | |
| | | | | | | | L0663: 1, L0664: 1, | | |
| | | | | | | | L2264: 1, L3827: 1, | | |
| | | | | | | | L3828: 1, H0519: 1, | | |
| | | | | | | | H0593: 1, H0435: 1, | | |
| | | | | | | | H0672: 1, H0436: 1, | | |
| | | | | | | | S0027: 1, L0740: 1, | | |
| | | | | | | | L0749: 1, L0731: 1, | | |
| | | | | | | | L0757: 1, L0758: 1, | | |
| | | | | | | | H0136: 1, H0423: 1 and | | |
| | | | | | | | S0446: 1. | | |
| 48 | HKABU43 | 838573 | 58 | 755-1600 | 165 | Ile-69 to Ala-74, | L0794: 7, L0803: 3, | | |
| | | | | | | Ala-122 to Ser-129, | H0052: 2, S0250: 2, | | |
| | | | | | | Thr-160 to Glu-170, | H0032: 2, H0494: 2, | | |
| | | | | | | Lys-197 to Arg-202. | H0529: 2, L0666: 2, | | |
| | | | | | | | L0663: 2, L0747: 2, | | |
| | | | | | | | L0759: 2, H0657: 1, | | |
| | | | | | | | H0664: 1, H0662: 1, | | |
| | | | | | | | S0442: 1, H0741: 1, | | |
| | | | | | | | H0735: 1, H0733: 1, | | |
| | | | | | | | S0046: 1, H0640: 1, | | |
| | | | | | | | H0331: 1, H0559: 1, | | |
| | | | | | | | T0039: 1, H0013: 1, | | |
| | | | | | | | S0280: 1, H0318: 1, | | |
| | | | | | | | T0110: 1, H0024: 1, | | |
| | | | | | | | S0364: 1, H0591: 1, | | |
| | | | | | | | H0038: 1, H0040: 1, | | |
| | | | | | | | S0142: 1, L0640: 1, | | |
| | | | | | | | L0667: 1, L0764: 1, | | |
| | | | | | | | L0662: 1, L0804: 1, | | |
| | | | | | | | L0659: 1, L0517: 1, | | |
| | | | | | | | L0789: 1, L4559: 1, | | |
| | | | | | | | L0664: 1, S0126: 1, | | |
| | | | | | | | H0435: 1, H0539: 1, | | |
| | | | | | | | S0152: 1, H0521: 1, | | |
| | | | | | | | H0522: 1, S0027: 1, | | |
| | | | | | | | L0779: 1, L0758: 1, | | |
| | | | | | | | L0485: 1, L0601: 1, | | |
| | | | | | | | S0026: 1, H0667: 1, | | |
| | | | | | | | S0192: 1, H0542: 1 and | | |
| | | | | | | | H0506: 1. | | |
| 49 | HLYGE16 | 651339 | 59 | 406-627 | 166 | Arg-23 to Trp-42, | H0255: 5, H0144: 3, | 7 | |
| | | | | | | Val-52 to Pro-61. | H0429: 2, L0662: 2, | | |
| | | | | | | | L0794: 2, L0803: 2, | | |
| | | | | | | | L0809: 2, L0758: 2, | | |
| | | | | | | | L0599: 2, H0542: 2, | | |
| | | | | | | | S0040: 1, H0650: 1, | | |
| | | | | | | | S0442: 1, H0642: 1, | | |
| | | | | | | | L0157: 1, H0571: 1, | | |
| | | | | | | | H0673: 1, H0494: 1, | | |
| | | | | | | | L0771: 1, L0766: 1, | | |
| | | | | | | | L0776: 1, L0629: 1, | | |
| | | | | | | | L0657: 1, L0659: 1, | | |
| | | | | | | | L0792: 1, L0565: 1, | | |
| | | | | | | | H0345: 1, L0748: 1, | | |
| | | | | | | | L0754: 1, L0747: 1, | | |
| | | | | | | | L0749: 1, H0445: 1 and | | |
| | | | | | | | S0242: 1. | | |
| 50 | HLYGY91 | 658703 | 60 | 211-339 | 167 | | H0692: 10, L0777: 10, | | |
| | | | | | | | L0805: 5, L0803: 3, | | |
| | | | | | | | L2497: 2, H0328: 2, | | |
| | | | | | | | L0662: 2, L0794: 2, | | |
| | | | | | | | L0809: 2, L3832: 2, | | |
| | | | | | | | L0748: 2, L0752: 2, | | |
| | | | | | | | L0599: 2, H0170: 1, | | |
| | | | | | | | H0402: 1, S0444: 1, | | |
| | | | | | | | S0360: 1, H0747: 1, | | |
| | | | | | | | L2486: 1, L3503: 1, | | |
| | | | | | | | H0427: 1, H0644: 1, | | |
| | | | | | | | H0038: 1, L0800: 1, | | |
| | | | | | | | L0648: 1, L0804: 1, | | |
| | | | | | | | H0670: 1, H0478: 1, | | |
| | | | | | | | L0731: 1, L0758: 1, | | |
| | | | | | | | H0445: 1, S0434: 1, | | |
| | | | | | | | L0591: 1 and L0362: 1. | | |
| 51 | HMCFH60 | 654853 | 61 | 211-357 | 168 | | L0659: 10, T0040: 9, | 6 | |
| | | | | | | | L0665: 9, L0759: 9, | | |
| | | | | | | | L0519: 8, L0776: 7, | | |
| | | | | | | | S0436: 7, L0744: 6, | | |
| | | | | | | | L0747: 6, L0749: 6, | | |
| | | | | | | | L0758: 6, S0418: 5, | | |
| | | | | | | | H0052: 5, H0457: 5, | | |
| | | | | | | | H0150: 5, L0769: 5, | | |
| | | | | | | | L0766: 5, L0748: 5, | | |
| | | | | | | | H0265: 4, S0420: 4, | | |
| | | | | | | | S0356: 4, S0360: 4, | | |
| | | | | | | | S0046: 4, S0010: 4, | | |
| | | | | | | | H0545: 4, H0687: 4, | | |
| | | | | | | | H0494: 4, S0440: 4, | | |
| | | | | | | | L0662: 4, L0768: 4, | | |
| | | | | | | | L0774: 4, L0775: 4, | | |
| | | | | | | | L0751: 4, L0754: 4, | | |
| | | | | | | | L0779: 4, H0484: 3, | | |
| | | | | | | | H0734: 3, H0549: 3, | | |
| | | | | | | | H0599: 3, H0421: 3, | | |
| | | | | | | | H0620: 3, S0051: 3, | | |
| | | | | | | | L0764: 3, L0666: 3, | | |
| | | | | | | | H0435: 3, H0648: 3, | | |
| | | | | | | | H0539: 3, L0596: 3, | | |
| | | | | | | | H0543: 3, H0624: 2, | | |
| | | | | | | | H0171: 2, H0556: 2, | | |
| | | | | | | | H0295: 2, H0657: 2, | | |
| | | | | | | | H0656: 2, S0354: 2, | | |
| | | | | | | | S0358: 2, S0376: 2, | | |
| | | | | | | | S0408: 2, S0007: 2, | | |
| | | | | | | | S0132: 2, S0476: 2, | | |
| | | | | | | | S0222: 2, H0486: 2, | | |
| | | | | | | | T0039: 2, H0635: 2, | | |
| | | | | | | | H0156: 2, H0618: 2, | | |
| | | | | | | | T0048: 2, H0581: 2, | | |
| | | | | | | | H0544: 2, H0373: 2, | | |
| | | | | | | | H0428: 2, T0006: 2, | | |
| | | | | | | | H0604: 2, H0031: 2, | | |
| | | | | | | | H0551: 2, T0067: 2, | | |
| | | | | | | | H0264: 2, H0647: 2, | | |
| | | | | | | | S0344: 2, L0638: 2, | | |
| | | | | | | | L0372: 2, L0641: 2, | | |
| | | | | | | | L0806: 2, L0653: 2, | | |
| | | | | | | | L0527: 2, L0809: 2, | | |
| | | | | | | | L0565: 2, L0438: 2, | | |
| | | | | | | | H0519: 2, H0689: 2, | | |
| | | | | | | | H0658: 2, H0672: 2, | | |
| | | | | | | | S0330: 2, S0406: 2, | | |
| | | | | | | | H0436: 2, S0027: 2, | | |
| | | | | | | | L0750: 2, S0434: 2, | | |
| | | | | | | | L0605: 2, S0194: 2, | | |
| | | | | | | | H0506: 2, H0685: 1, | | |
| | | | | | | | H0713: 1, H0717: 1, | | |
| | | | | | | | H0740: 1, H0294: 1, | | |
| | | | | | | | S0212: 1, S0110: 1, | | |
| | | | | | | | S0282: 1, H0483: 1, | | |
| | | | | | | | S0442: 1, H0637: 1, | | |
| | | | | | | | H0733: 1, S0468: 1, | | |
| | | | | | | | H0747: 1, L3388: 1, | | |
| | | | | | | | H0351: 1, H0550: 1, | | |
| | | | | | | | H0587: 1, H0642: 1, | | |
| | | | | | | | H0559: 1, L0622: 1, | | |
| | | | | | | | L3653: 1, H0013: 1, | | |
| | | | | | | | H0250: 1, H0069: 1, | | |
| | | | | | | | S0280: 1, H0706: 1, | | |
| | | | | | | | S0346: 1, H0705: 1, | | |
| | | | | | | | H0318: 1, S0049: 1, | | |
| | | | | | | | H0748: 1, L0040: 1, | | |
| | | | | | | | H0597: 1, L0738: 1, | | |
| | | | | | | | H0009: 1, H0563: 1, | | |
| | | | | | | | H0123: 1, H0050: 1, | | |
| | | | | | | | L0471: 1, H0012: 1, | | |
| | | | | | | | H0024: 1, H0014: 1, | | |
| | | | | | | | S0388: 1, H0239: 1, | | |
| | | | | | | | H0594: 1, S6028: 1, | | |
| | | | | | | | H0271: 1, H0292: 1, | | |
| | | | | | | | H0213: 1, H0628: 1, | | |
| | | | | | | | H0673: 1, H0068: 1, | | |
| | | | | | | | S0036: 1, H0135: 1, | | |
| | | | | | | | H0090: 1, H0038: 1, | | |
| | | | | | | | H0634: 1, H0087: 1, | | |
| | | | | | | | H0488: 1, H0268: 1, | | |
| | | | | | | | H0412: 1, H0413: 1, | | |
| | | | | | | | S0038: 1, T0042: 1, | | |
| | | | | | | | H0560: 1, H0641: 1, | | |
| | | | | | | | S0210: 1, S0422: 1, | | |
| | | | | | | | S0002: 1, H0529: 1, | | |
| | | | | | | | L0770: 1, L0637: 1, | | |
| | | | | | | | L3905: 1, L5566: 1, | | |
| | | | | | | | L0761: 1, L0772: 1, | | |
| | | | | | | | L0646: 1, L0374: 1, | | |
| | | | | | | | L0771: 1, L4500: 1, | | |
| | | | | | | | L0651: 1, L0784: 1, | | |
| | | | | | | | L0807: 1, L0657: 1, | | |
| | | | | | | | L0658: 1, L0656: 1, | | |
| | | | | | | | L0782: 1, L0783: 1, | | |
| | | | | | | | L0530: 1, L0647: 1, | | |
| | | | | | | | L0788: 1, L0663: 1, | | |
| | | | | | | | L0664: 1, S0216: 1, | | |
| | | | | | | | H0693: 1, L3826: 1, | | |
| | | | | | | | H0520: 1, H0547: 1, | | |
| | | | | | | | S0126: 1, H0682: 1, | | |
| | | | | | | | H0659: 1, S0328: 1, | | |
| | | | | | | | S0380: 1, H0710: 1, | | |
| | | | | | | | H0521: 1, H0522: 1, | | |
| | | | | | | | H0627: 1, S0028: 1, | | |
| | | | | | | | L0741: 1, L0742: 1, | | |
| | | | | | | | L0439: 1, L0740: 1, | | |
| | | | | | | | L0756: 1, L0786: 1, | | |
| | | | | | | | L0780: 1, L0755: 1, | | |
| | | | | | | | L0581: 1, L0595: 1, | | |
| | | | | | | | L0601: 1, H0667: 1, | | |
| | | | | | | | S0192: 1, H0542: 1, | | |
| | | | | | | | L0718: 1 and S0424: 1. | | |
| 52 | HMIAK10 | 562774 | 62 | 195-290 | 169 | | S6028: 1 | 11 | |
| 53 | HMIBD93 | 634227 | 63 | 983-1180 | 170 | Pro-4 to Gly-13, | L0439: 6, L0751: 5, | | |
| | | | | | | Ala-42 to Ser-50. | L0770: 3, L0769: 3, | | |
| | | | | | | | L0764: 3, H0617: 2, | | |
| | | | | | | | L0766: 2, L0752: 2, | | |
| | | | | | | | H0445: 2, S6024: 1, | | |
| | | | | | | | H0351: 1, S0222: 1, | | |
| | | | | | | | H0586: 1, S0010: 1, | | |
| | | | | | | | S6028: 1, L0768: 1, | | |
| | | | | | | | L0794: 1, L0438: 1, | | |
| | | | | | | | L0747: 1, L0753: 1 and | | |
| | | | | | | | L0758: 1. | | |
| 54 | HMWJF53 | 758158 | 64 | 1015-1131 | 171 | | H0255: 7, H0318: 5, | 2 | |
| | | | | | | | H0620: 5, L0754: 5, | | |
| | | | | | | | L0766: 4, L0666: 4, | | |
| | | | | | | | S0358: 3, H0457: 3, | | |
| | | | | | | | H0135: 3, L0776: 3, | | |
| | | | | | | | L0809: 3, H0696: 3, | | |
| | | | | | | | S3012: 3, H0624: 2, | | |
| | | | | | | | H0295: 2, H0254: 2, | | |
| | | | | | | | H0662: 2, H0402: 2, | | |
| | | | | | | | H0305: 2, S0132: 2, | | |
| | | | | | | | L0717: 2, L0021: 2, | | |
| | | | | | | | H0617: 2, H0673: 2, | | |
| | | | | | | | L0769: 2, L0638: 2, | | |
| | | | | | | | L0796: 2, L0667: 2, | | |
| | | | | | | | L0662: 2, L0653: 2, | | |
| | | | | | | | L0783: 2, L0663: 2, | | |
| | | | | | | | S0126: 2, H0539: 2, | | |
| | | | | | | | H0521: 2, S0044: 2, | | |
| | | | | | | | S0027: 2, L0745: 2, | | |
| | | | | | | | L0747: 2, L0755: 2, | | |
| | | | | | | | L0587: 2, H0352: 2, | | |
| | | | | | | | H0170: 1, H0556: 1, | | |
| | | | | | | | H0657: 1, H0341: 1, | | |
| | | | | | | | S0212: 1, S0418: 1, | | |
| | | | | | | | S0360: 1, S0410: 1, | | |
| | | | | | | | H0339: 1, H0549: 1, | | |
| | | | | | | | S0222: 1, H0441: 1, | | |
| | | | | | | | H0331: 1, H0486: 1, | | |
| | | | | | | | H0427: 1, H0575: 1, | | |
| | | | | | | | T0048: 1, H0581: 1, | | |
| | | | | | | | H0052: 1, H0545: 1, | | |
| | | | | | | | H0150: 1, H0570: 1, | | |
| | | | | | | | H0569: 1, L0163: 1, | | |
| | | | | | | | H0083: 1, H0355: 1, | | |
| | | | | | | | H0252: 1, H0039: 1, | | |
| | | | | | | | T0023: 1, H0124: 1, | | |
| | | | | | | | H0090: 1, H0413: 1, | | |
| | | | | | | | H0560: 1, H0561: 1, | | |
| | | | | | | | S0372: 1, H0509: 1, | | |
| | | | | | | | H0652: 1, S0144: 1, | | |
| | | | | | | | S0422: 1, L0762: 1, | | |
| | | | | | | | L0770: 1, L0761: 1, | | |
| | | | | | | | L0373: 1, L0372: 1, | | |
| | | | | | | | L0645: 1, L0764: 1, | | |
| | | | | | | | L0771: 1, L0648: 1, | | |
| | | | | | | | L0768: 1, L0649: 1, | | |
| | | | | | | | L0804: 1, L0651: 1, | | |
| | | | | | | | L0806: 1, L0655: 1, | | |
| | | | | | | | L0659: 1, L0517: 1, | | |
| | | | | | | | L0528: 1, L0665: 1, | | |
| | | | | | | | H0698: 1, S0374: 1, | | |
| | | | | | | | L0438: 1, H0684: 1, | | |
| | | | | | | | H0658: 1, H0670: 1, | | |
| | | | | | | | S0328: 1, S0380: 1, | | |
| | | | | | | | H0134: 1, S0406: 1, | | |
| | | | | | | | L0743: 1, L0749: 1, | | |
| | | | | | | | L0750: 1, L0779: 1, | | |
| | | | | | | | L0759: 1, S0031: 1, | | |
| | | | | | | | H0445: 1, H0653: 1, | | |
| | | | | | | | S0194: 1, S0276: 1, | | |
| | | | | | | | H0542: 1 and S0460: 1. | | |
| 55 | HNECL22 | 799541 | 65 | 472-576 | 172 | | L0748: 54, L0766: 20, | 8 | |
| | | | | | | | L0754: 18, H0179: 12, | | |
| | | | | | | | L0777: 12, L0750: 11, | | |
| | | | | | | | L0749: 10, S0116: 9, | | |
| | | | | | | | H0271: 9, L0761: 9, | | |
| | | | | | | | H0031: 8, L0794: 8, | | |
| | | | | | | | H0144: 8, L0744: 8, | | |
| | | | | | | | H0457: 7, S0356: 6, | | |
| | | | | | | | H0393: 6, H0013: 6, | | |
| | | | | | | | L0438: 6, L0743: 6, | | |
| | | | | | | | L0751: 6, L0745: 6, | | |
| | | | | | | | L0779: 6, L0758: 6, | | |
| | | | | | | | H0421: 5, L0805: 5, | | |
| | | | | | | | H0436: 5, H0305: 4, | | |
| | | | | | | | H0599: 4, H0050: 4, | | |
| | | | | | | | L0769: 4, L0646: 4, | | |
| | | | | | | | L0771: 4, L0803: 4, | | |
| | | | | | | | L0776: 4, L0809: 4, | | |
| | | | | | | | S0428: 4, L0603: 4, | | |
| | | | | | | | H0662: 3, S0358: 3, | | |
| | | | | | | | S0045: 3, H0747: 3, | | |
| | | | | | | | H0549: 3, H0497: 3, | | |
| | | | | | | | S0474: 3, H0674: 3, | | |
| | | | | | | | H0591: 3, H0625: 3, | | |
| | | | | | | | S0422: 3, L0800: 3, | | |
| | | | | | | | L0773: 3, L0792: 3, | | |
| | | | | | | | L0666: 3, S0052: 3, | | |
| | | | | | | | S0028: 3, L0759: 3, | | |
| | | | | | | | H0542: 3, H0556: 2, | | |
| | | | | | | | H0341: 2, H0402: 2, | | |
| | | | | | | | S0354: 2, S0376: 2, | | |
| | | | | | | | S0046: 2, H0559: 2, | | |
| | | | | | | | H0575: 2, H0590: 2, | | |
| | | | | | | | H0581: 2, H0024: 2, | | |
| | | | | | | | H0266: 2, H0553: 2, | | |
| | | | | | | | H0032: 2, H0673: 2, | | |
| | | | | | | | H0087: 2, H0264: 2, | | |
| | | | | | | | H0100: 2, H0494: 2, | | |
| | | | | | | | H0529: 2, L0774: 2, | | |
| | | | | | | | L0493: 2, L0659: 2, | | |
| | | | | | | | L0790: 2, L0664: 2, | | |
| | | | | | | | H0518: 2, S0044: 2, | | |
| | | | | | | | L0747: 2, L0780: 2, | | |
| | | | | | | | L0752: 2, L0605: 2, | | |
| | | | | | | | L0599: 2, L0593: 2, | | |
| | | | | | | | H0721: 2, H0171: 1, | | |
| | | | | | | | L3642: 1, L3644: 1, | | |
| | | | | | | | S0114: 1, H0583: 1, | | |
| | | | | | | | L0785: 1, H0419: 1, | | |
| | | | | | | | H0255: 1, H0589: 1, | | |
| | | | | | | | H0638: 1, H0125: 1, | | |
| | | | | | | | S0418: 1, S0444: 1, | | |
| | | | | | | | H0151: 1, S0476: 1, | | |
| | | | | | | | H0619: 1, S6026: 1, | | |
| | | | | | | | H0261: 1, H0431: 1, | | |
| | | | | | | | H0392: 1, H0069: 1, | | |
| | | | | | | | H0075: 1, H0635: 1, | | |
| | | | | | | | T0070: 1, H0156: 1, | | |
| | | | | | | | H0618: 1, S0010: 1, | | |
| | | | | | | | H0318: 1, H0310: 1, | | |
| | | | | | | | H0052: 1, H0251: 1, | | |
| | | | | | | | T0110: 1, H0046: 1, | | |
| | | | | | | | H0439: 1, H0086: 1, | | |
| | | | | | | | H0081: 1, H0057: 1, | | |
| | | | | | | | H0051: 1, H0375: 1, | | |
| | | | | | | | H0109: 1, H0416: 1, | | |
| | | | | | | | S0318: 1, S0314: 1, | | |
| | | | | | | | H0030: 1, H0111: 1, | | |
| | | | | | | | L0455: 1, H0040: 1, | | |
| | | | | | | | H0056: 1, H0623: 1, | | |
| | | | | | | | T0041: 1, T0042: 1, | | |
| | | | | | | | S0210: 1, S0002: 1, | | |
| | | | | | | | S0426: 1, L0598: 1, | | |
| | | | | | | | L0641: 1, L0764: 1, | | |
| | | | | | | | L0768: 1, L0807: 1, | | |
| | | | | | | | L0514: 1, L0658: 1, | | |
| | | | | | | | L0783: 1, L5623: 1, | | |
| | | | | | | | L0788: 1, L0663: 1, | | |
| | | | | | | | L0665: 1, S0374: 1, | | |
| | | | | | | | H0519: 1, S0122: 1, | | |
| | | | | | | | H0659: 1, H0658: 1, | | |
| | | | | | | | H0666: 1, H0672: 1, | | |
| | | | | | | | S0328: 1, H0521: 1, | | |
| | | | | | | | H0522: 1, S0406: 1, | | |
| | | | | | | | H0555: 1, H0478: 1, | | |
| | | | | | | | H0727: 1, L0742: 1, | | |
| | | | | | | | L0755: 1, L0731: 1, | | |
| | | | | | | | S0011: 1, S0026: 1, | | |
| | | | | | | | H0543: 1, H0423: 1, | | |
| | | | | | | | H0422: 1 and H0506: 1. | | |
| 56 | HNFAC50 | 815676 | 66 | 676-774 | 173 | Lys-7 to Glu-18. | L0769: 5, L0756: 4, | | |
| | | | | | | | S0444: 3, L0774: 3, | | |
| | | | | | | | H0624: 2, S0408: 2, | | |
| | | | | | | | H0587: 2, L0764: 2, | | |
| | | | | | | | L0766: 2, H0170: 1, | | |
| | | | | | | | H0497: 1, H0333: 1, | | |
| | | | | | | | H0156: 1, L0022: 1, | | |
| | | | | | | | H0271: 1, S0344: 1, | | |
| | | | | | | | L0637: 1, L0772: 1, | | |
| | | | | | | | L0773: 1, L0662: 1, | | |
| | | | | | | | L0775: 1, L0809: 1, | | |
| | | | | | | | L0791: 1, L0663: 1, | | |
| | | | | | | | H0144: 1, S0374: 1, | | |
| | | | | | | | L3811: 1, H0593: 1, | | |
| | | | | | | | H0660: 1, H0648: 1, | | |
| | | | | | | | H0672: 1, H0696: 1, | | |
| | | | | | | | L0749: 1, L0750: 1, | | |
| | | | | | | | L0779: 1, L0752: 1, | | |
| | | | | | | | L0755: 1, L0599: 1, | | |
| | | | | | | | L0601: 1 and H0667: 1. | | |
| 57 | HNGEA34 | 815678 | 67 | 58-192 | 174 | His-26 to Ser-32. | H0393: 1 and S0052: 1. | 2 | |
| 58 | HNGIV64 | 561572 | 68 | 221-247 | 175 | | S0052: 1 | | |
| 59 | HNGKT41 | 836061 | 69 | 415-552 | 176 | | S0428: 1 | 5 | |
| 60 | HNGNO53 | 836063 | 70 | 467-571 | 177 | | S0428: 2 and L0439: 1. | 10, 8 | |
| 61 | HNHCT47 | 634691 | 71 | 73-192 | 178 | Asn-25 to Thr-33. | S0053: 2 and S0046: 1. | 11, 17, 5 | |
| 62 | HNHKI74 | 777856 | 72 | 127-159 | 179 | | S0216: 1 | | |
| 63 | HORBS82 | 638293 | 73 | 21-140 | 180 | Gly-30 to Ser-35. | H0706: 2, L0809: 2, | 20 | |
| | | | | | | | S0360: 1, L0623: 1, | | |
| | | | | | | | H0122: 1, H0041: 1, | | |
| | | | | | | | H0095: 1, H0292: 1, | | |
| | | | | | | | H0424: 1, S0364: 1, | | |
| | | | | | | | L0794: 1, L0787: 1, | | |
| | | | | | | | L0663: 1, H0780: 1, | | |
| | | | | | | | H0435: 1, L0743: 1, | | |
| | | | | | | | L0747: 1 and L0731: 1. | | |
| 64 | HOUDE92 | 580866 | 74 | 70-336 | 181 | Pro-22 to His-31, | H0052: 17, L0745: 11, | 12p13 | |
| | | | | | | Ser-80 to Gln-88. | L0748: 10, H0547: 7, | | |
| | | | | | | | L0439: 7, L0755: 6, | | |
| | | | | | | | L0771: 5, L0774: 5, | | |
| | | | | | | | L0662: 4, L0746: 4, | | |
| | | | | | | | L0777: 4, S0474: 3, | | |
| | | | | | | | L0163: 3, H0059: 3, | | |
| | | | | | | | H0100: 3, L0775: 3, | | |
| | | | | | | | L0741: 3, H0261: 2, | | |
| | | | | | | | H0333: 2, H0194: 2, | | |
| | | | | | | | H0545: 2, H0012: 2, | | |
| | | | | | | | H0617: 2, H0135: 2, | | |
| | | | | | | | L0770: 2, L0665: 2, | | |
| | | | | | | | L0438: 2, H0520: 2, | | |
| | | | | | | | L0747: 2, L0752: 2, | | |
| | | | | | | | L0753: 2, S0040: 1, | | |
| | | | | | | | L0717: 1, H0437: 1, | | |
| | | | | | | | H0550: 1, S6016: 1, | | |
| | | | | | | | H0497: 1, H0574: 1, | | |
| | | | | | | | H0599: 1, H0575: 1, | | |
| | | | | | | | H0618: 1, H0253: 1, | | |
| | | | | | | | H0041: 1, H0620: 1, | | |
| | | | | | | | H0373: 1, H0188: 1, | | |
| | | | | | | | H0124: 1, H0068: 1, | | |
| | | | | | | | H0040: 1, H0561: 1, | | |
| | | | | | | | S0448: 1, S0210: 1, | | |
| | | | | | | | L0763: 1, L0644: 1, | | |
| | | | | | | | L0767: 1, L0768: 1, | | |
| | | | | | | | L0375: 1, L0651: 1, | | |
| | | | | | | | L0659: 1, L0540: 1, | | |
| | | | | | | | L5622: 1, H0144: 1, | | |
| | | | | | | | H0593: 1, S0126: 1, | | |
| | | | | | | | H0539: 1, S0152: 1, | | |
| | | | | | | | H0694: 1, S0390: 1, | | |
| | | | | | | | S0028: 1, L0749: 1, | | |
| | | | | | | | L0786: 1, L0780: 1, | | |
| | | | | | | | L0731: 1, L0757: 1, | | |
| | | | | | | | L0758: 1, S0436: 1, | | |
| | | | | | | | L0592: 1 and S0276: 1. | | |
| 65 | HOUFS04 | 771564 | 75 | 520-738 | 182 | | L0745: 15, S0414: 6, | | |
| | | | | | | | H0351: 5, H0013: 5, | | |
| | | | | | | | S0422: 5, L0803: 5, | | |
| | | | | | | | H0144: 4, H0413: 3, | | |
| | | | | | | | H0519: 3, L0754: 3, | | |
| | | | | | | | L0759: 3, S0242: 3, | | |
| | | | | | | | H0624: 2, H0580: 2, | | |
| | | | | | | | S0045: 2, L3655: 2, | | |
| | | | | | | | H0421: 2, H0375: 2, | | |
| | | | | | | | H0428: 2, H0553: 2, | | |
| | | | | | | | L0598: 2, L0775: 2, | | |
| | | | | | | | L5622: 2, L0666: 2, | | |
| | | | | | | | L0664: 2, L0665: 2, | | |
| | | | | | | | H0520: 2, H0547: 2, | | |
| | | | | | | | S0126: 2, H0672: 2, | | |
| | | | | | | | S0380: 2, H0521: 2, | | |
| | | | | | | | L0743: 2, L0744: 2, | | |
| | | | | | | | L0605: 2, H0171: 1, | | |
| | | | | | | | H0556: 1, H0685: 1, | | |
| | | | | | | | S0040: 1, S0114: 1, | | |
| | | | | | | | H0657: 1, S0212: 1, | | |
| | | | | | | | S0444: 1, H0733: 1, | | |
| | | | | | | | H0734: 1, H0749: 1, | | |
| | | | | | | | S0132: 1, H0619: 1, | | |
| | | | | | | | L3388: 1, H0411: 1, | | |
| | | | | | | | S0278: 1, H0549: 1, | | |
| | | | | | | | S0222: 1, L3816: 1, | | |
| | | | | | | | H0486: 1, S0280: 1, | | |
| | | | | | | | H0575: 1, L0105: 1, | | |
| | | | | | | | H0581: 1, H0052: 1, | | |
| | | | | | | | H0545: 1, H0594: 1, | | |
| | | | | | | | S6028: 1, H0687: 1, | | |
| | | | | | | | S0250: 1, H0031: 1, | | |
| | | | | | | | S0364: 1, L0455: 1, | | |
| | | | | | | | H0124: 1, H0591: 1, | | |
| | | | | | | | H0038: 1, S0450: 1, | | |
| | | | | | | | L0763: 1, L0638: 1, | | |
| | | | | | | | L0637: 1, L0662: 1, | | |
| | | | | | | | L0794: 1, L0649: 1, | | |
| | | | | | | | L0654: 1, L0382: 1, | | |
| | | | | | | | L0792: 1, L3811: 1, | | |
| | | | | | | | L3824: 1, L3828: 1, | | |
| | | | | | | | H0435: 1, H0518: 1, | | |
| | | | | | | | H0696: 1, H0436: 1, | | |
| | | | | | | | S0432: 1, S0390: 1, | | |
| | | | | | | | S0037: 1, S3014: 1, | | |
| | | | | | | | S0028: 1, S0124: 1, | | |
| | | | | | | | L0751: 1, L0756: 1, | | |
| | | | | | | | L0779: 1, L0777: 1, | | |
| | | | | | | | L0780: 1, L0752: 1, | | |
| | | | | | | | L0755: 1, S0031: 1, | | |
| | | | | | | | L0599: 1, S0196: 1, | | |
| | | | | | | | H0423: 1, H0422: 1 and | | |
| | | | | | | | H0721: 1. | | |
| 66 | HOUHI25 | 888279 | 76 | 188-250 | 183 | | S0436: 7, H0551: 6, | | |
| | | | | | | | L2985: 5, H0599: 5, | | |
| | | | | | | | L0805: 5, L0756: 5, | | |
| | | | | | | | L0758: 5, L0759: 5, | | |
| | | | | | | | L0754: 4, L0747: 4, | | |
| | | | | | | | L3655: 3, H0545: 3, | | |
| | | | | | | | S0003: 3, L0375: 3, | | |
| | | | | | | | H0144: 3, L0755: 3, | | |
| | | | | | | | S0442: 2, L3649: 2, | | |
| | | | | | | | S0045: 2, L3816: 2, | | |
| | | | | | | | H0013: 2, L0471: 2, | | |
| | | | | | | | H0373: 2, H0051: 2, | | |
| | | | | | | | H0560: 2, S0422: 2, | | |
| | | | | | | | L0768: 2, L0803: 2, | | |
| | | | | | | | L0650: 2, L0659: 2, | | |
| | | | | | | | L0438: 2, L0439: 2, | | |
| | | | | | | | L0740: 2, L0750: 2, | | |
| | | | | | | | L0779: 2, L0757: 2, | | |
| | | | | | | | S0242: 2, H0739: 1, | | |
| | | | | | | | H0624: 1, S0040: 1, | | |
| | | | | | | | S0342: 1, S0116: 1, | | |
| | | | | | | | S0212: 1, S0444: 1, | | |
| | | | | | | | H0747: 1, L3280: 1, | | |
| | | | | | | | H0357: 1, H0587: 1, | | |
| | | | | | | | L0021: 1, S0010: 1, | | |
| | | | | | | | L0105: 1, S0474: 1, | | |
| | | | | | | | H0544: 1, H0046: 1, | | |
| | | | | | | | S0051: 1, H0266: 1, | | |
| | | | | | | | H0622: 1, H0032: 1, | | |
| | | | | | | | H0388: 1, H0598: 1, | | |
| | | | | | | | H0413: 1, S0438: 1, | | |
| | | | | | | | H0641: 1, S0002: 1, | | |
| | | | | | | | L0770: 1, L3904: 1, | | |
| | | | | | | | L0662: 1, L0776: 1, | | |
| | | | | | | | L0809: 1, L0519: 1, | | |
| | | | | | | | L5622: 1, L5623: 1, | | |
| | | | | | | | L0663: 1, L0664: 1, | | |
| | | | | | | | L2260: 1, L2381: 1, | | |
| | | | | | | | L2673: 1, L3827: 1, | | |
| | | | | | | | H0520: 1, S0126: 1, | | |
| | | | | | | | L3832: 1, L0753: 1, | | |
| | | | | | | | S0434: 1, L0599: 1, | | |
| | | | | | | | S0011: 1, H0667: 1, | | |
| | | | | | | | L3560: 1 and L3585: 1. | | |
| 67 | HPCAL26 | 762822 | 77 | 1021-1113 | 184 | | L0659: 11, S0126: 11, | 11 | |
| | | | | | | | L0731: 11, S0192: 11, | | |
| | | | | | | | L0666: 9, L0777: 7, | | |
| | | | | | | | T0049: 5, S0358: 5, | | |
| | | | | | | | L0771: 5, L0757: 5, | | |
| | | | | | | | S0360: 4, S0440: 4, | | |
| | | | | | | | L0740: 4, L0758: 4, | | |
| | | | | | | | S0212: 3, S0356: 3, | | |
| | | | | | | | S0046: 3, H0369: 3, | | |
| | | | | | | | H0545: 3, L0662: 3, | | |
| | | | | | | | L0774: 3, L0809: 3, | | |
| | | | | | | | H0519: 3, L0752: 3, | | |
| | | | | | | | S0011: 3, H0295: 2, | | |
| | | | | | | | H0662: 2, S0468: 2, | | |
| | | | | | | | H0012: 2, H0024: 2, | | |
| | | | | | | | H0356: 2, H0616: 2, | | |
| | | | | | | | H0268: 2, H0412: 2, | | |
| | | | | | | | L0646: 2, L0803: 2, | | |
| | | | | | | | S0013: 2, L0754: 2, | | |
| | | | | | | | L0747: 2, L0759: 2, | | |
| | | | | | | | S0040: 1, S0418: 1, | | |
| | | | | | | | S0442: 1, S0376: 1, | | |
| | | | | | | | H0676: 1, L0717: 1, | | |
| | | | | | | | H0550: 1, S0222: 1, | | |
| | | | | | | | H0574: 1, L0021: 1, | | |
| | | | | | | | H0575: 1, H0036: 1, | | |
| | | | | | | | H0590: 1, H0618: 1, | | |
| | | | | | | | T0048: 1, H0309: 1, | | |
| | | | | | | | H0596: 1, T0110: 1, | | |
| | | | | | | | H0546: 1, H0046: 1, | | |
| | | | | | | | H0123: 1, H0014: 1, | | |
| | | | | | | | S0003: 1, S0022: 1, | | |
| | | | | | | | H0428: 1, H0622: 1, | | |
| | | | | | | | H0031: 1, H0673: 1, | | |
| | | | | | | | L0455: 1, H0316: 1, | | |
| | | | | | | | H0598: 1, H0163: 1, | | |
| | | | | | | | H0038: 1, H0433: 1, | | |
| | | | | | | | H0413: 1, T0069: 1, | | |
| | | | | | | | S0438: 1, H0633: 1, | | |
| | | | | | | | H0647: 1, S0210: 1, | | |
| | | | | | | | L0770: 1, L0769: 1, | | |
| | | | | | | | L0768: 1, L0794: 1, | | |
| | | | | | | | L0519: 1, L0789: 1, | | |
| | | | | | | | L0790: 1, L0664: 1, | | |
| | | | | | | | L0665: 1, H0144: 1, | | |
| | | | | | | | S0330: 1, S0136: 1, | | |
| | | | | | | | H0696: 1, S3014: 1, | | |
| | | | | | | | S0206: 1, L0751: 1, | | |
| | | | | | | | L0749: 1, L0756: 1, | | |
| | | | | | | | L0779: 1, S0031: 1, | | |
| | | | | | | | S0242: 1, S0194: 1 and | | |
| | | | | | | | S0276: 1. | | |
| 68 | HPEBA84 | 753957 | 78 | 533-643 | 185 | | L0591: 2, L3643: 1, | 1, 10 | |
| | | | | | | | S0420: 1, L3388: 1, | | |
| | | | | | | | H0057: 1, H0166: 1, | | |
| | | | | | | | L0648: 1, L0518: 1, | | |
| | | | | | | | L0809: 1, L0519: 1, | | |
| | | | | | | | L0754: 1 and L0599: 1. | | |
| 69 | HSAVA08 | 580870 | 79 | 66-146 | 186 | Thr-15 to Gln-22. | S0114: 2 | 16 | |
| 70 | HSHAX04 | 812178 | 80 | 42-215 | 187 | | L0731: 6, H0265: 4, | 1 | |
| | | | | | | | L0483: 4, H0424: 4, | | |
| | | | | | | | H0253: 3, H0318: 3, | | |
| | | | | | | | L0769: 3, L0774: 3, | | |
| | | | | | | | L0776: 3, S0037: 3, | | |
| | | | | | | | L0742: 3, L0750: 3, | | |
| | | | | | | | L0755: 3, S0360: 2, | | |
| | | | | | | | H0581: 2, H0266: 2, | | |
| | | | | | | | H0213: 2, H0124: 2, | | |
| | | | | | | | H0413: 2, L0766: 2, | | |
| | | | | | | | L0659: 2, L0809: 2, | | |
| | | | | | | | S3014: 2, L0749: 2, | | |
| | | | | | | | L0757: 2, L0758: 2, | | |
| | | | | | | | L0759: 2, L0596: 2, | | |
| | | | | | | | L0595: 2, H0543: 2, | | |
| | | | | | | | H0422: 2, H0686: 1, | | |
| | | | | | | | H0685: 1, S0040: 1, | | |
| | | | | | | | H0295: 1, H0294: 1, | | |
| | | | | | | | S0430: 1, H0638: 1, | | |
| | | | | | | | S0418: 1, S0420: 1, | | |
| | | | | | | | S0354: 1, S0358: 1, | | |
| | | | | | | | S0376: 1, S0045: 1, | | |
| | | | | | | | H0586: 1, H0497: 1, | | |
| | | | | | | | H0333: 1, H0486: 1, | | |
| | | | | | | | H0069: 1, H0575: 1, | | |
| | | | | | | | H0618: 1, H0052: 1, | | |
| | | | | | | | H0085: 1, H0009: 1, | | |
| | | | | | | | S0051: 1, H0083: 1, | | |
| | | | | | | | H0284: 1, H0428: 1, | | |
| | | | | | | | H0417: 1, H0553: 1, | | |
| | | | | | | | H0628: 1, H0038: 1, | | |
| | | | | | | | H0280: 1, H0494: 1, | | |
| | | | | | | | H0625: 1, S0150: 1, | | |
| | | | | | | | S0426: 1, L0667: 1, | | |
| | | | | | | | L0646: 1, L0764: 1, | | |
| | | | | | | | L0773: 1, L0648: 1, | | |
| | | | | | | | L0767: 1, L0768: 1, | | |
| | | | | | | | L0375: 1, L0806: 1, | | |
| | | | | | | | L0519: 1, L0666: 1, | | |
| | | | | | | | L0663: 1, H0698: 1, | | |
| | | | | | | | H0689: 1, H0539: 1, | | |
| | | | | | | | H0518: 1, S0027: 1, | | |
| | | | | | | | S0028: 1, L0747: 1, | | |
| | | | | | | | L0752: 1, H0707: 1, | | |
| | | | | | | | L0597: 1, L0581: 1, | | |
| | | | | | | | L0361: 1, H0653: 1, | | |
| | | | | | | | H0542: 1 and H0506: 1. | | |
| 71 | HSKDR27 | 580874 | 81 | 473-556 | 188 | Pro-18 to Gly-26. | S0027: 95, S0192: 54, | 19 | |
| | | | | | | | S3014: 53, S0126: 42, | | |
| | | | | | | | S0040: 35, H0424: 23, | | |
| | | | | | | | S0028: 22, S0037: 19, | | |
| | | | | | | | S3012: 16, H0213: 13, | | |
| | | | | | | | T0006: 12, H0250: 11, | | |
| | | | | | | | S0032: 11, L0744: 11, | | |
| | | | | | | | T0040: 10, H0124: 10, | | |
| | | | | | | | H0429: 10, L0740: 10, | | |
| | | | | | | | L0588: 10, L0754: 9, | | |
| | | | | | | | H0545: 8, H0280: 8, | | |
| | | | | | | | S0194: 8, S0196: 7, | | |
| | | | | | | | H0392: 6, T0039: 6, | | |
| | | | | | | | H0150: 6, H0039: 6, | | |
| | | | | | | | S0206: 6, L0743: 6, | | |
| | | | | | | | L0731: 6, S0342: 5, | | |
| | | | | | | | S0212: 5, S0045: 5, | | |
| | | | | | | | H0486: 5, H0575: 5, | | |
| | | | | | | | H0014: 5, H0090: 5, | | |
| | | | | | | | H0551: 5, H0100: 5, | | |
| | | | | | | | S0044: 5, S0011: 5, | | |
| | | | | | | | H0255: 4, H0318: 4, | | |
| | | | | | | | H0271: 4, S0022: 4, | | |
| | | | | | | | H0031: 4, H0181: 4, | | |
| | | | | | | | H0032: 4, H0038: 4, | | |
| | | | | | | | T0067: 4, S0124: 4, | | |
| | | | | | | | L0747: 4, L0749: 4, | | |
| | | | | | | | H0402: 3, H0309: 3, | | |
| | | | | | | | H0046: 3, S0250: 3, | | |
| | | | | | | | H0068: 3, H0087: 3, | | |
| | | | | | | | H0059: 3, S0142: 3, | | |
| | | | | | | | S0053: 3, H0419: 2, | | |
| | | | | | | | S0116: 2, S0408: 2, | | |
| | | | | | | | S0132: 2, S0278: 2, | | |
| | | | | | | | S0222: 2, H0331: 2, | | |
| | | | | | | | T0060: 2, H0069: 2, | | |
| | | | | | | | H0427: 2, H0599: 2, | | |
| | | | | | | | T0082: 2, H0253: 2, | | |
| | | | | | | | H0546: 2, H0086: 2, | | |
| | | | | | | | H0123: 2, H0024: 2, | | |
| | | | | | | | H0015: 2, H0510: 2, | | |
| | | | | | | | H0428: 2, T0023: 2, | | |
| | | | | | | | H0163: 2, H0063: 2, | | |
| | | | | | | | H0509: 2, L0772: 2, | | |
| | | | | | | | L0805: 2, S0052: 2, | | |
| | | | | | | | H0547: 2, H0518: 2, | | |
| | | | | | | | L0748: 2, L0751: 2, | | |
| | | | | | | | L0745: 2, L0750: 2, | | |
| | | | | | | | L0777: 2, L0755: 2, | | |
| | | | | | | | L0757: 2, H0445: 2, | | |
| | | | | | | | L0590: 2, L0599: 2, | | |
| | | | | | | | S0026: 2, S0242: 2, | | |
| | | | | | | | H0171: 1, H0265: 1, | | |
| | | | | | | | H0716: 1, H0294: 1, | | |
| | | | | | | | S0298: 1, H0662: 1, | | |
| | | | | | | | H0450: 1, S0360: 1, | | |
| | | | | | | | H0329: 1, S0046: 1, | | |
| | | | | | | | H0411: 1, S6022: 1, | | |
| | | | | | | | H0431: 1, H0357: 1, | | |
| | | | | | | | H0455: 1, H0586: 1, | | |
| | | | | | | | H0587: 1, L0021: 1, | | |
| | | | | | | | H0042: 1, T0048: 1, | | |
| | | | | | | | H0505: 1, H0052: 1, | | |
| | | | | | | | H0251: 1, H0235: 1, | | |
| | | | | | | | H0231: 1, H0544: 1, | | |
| | | | | | | | H0050: 1, H0051: 1, | | |
| | | | | | | | H0071: 1, H0083: 1, | | |
| | | | | | | | H0060: 1, H0266: 1, | | |
| | | | | | | | H0188: 1, H0292: 1, | | |
| | | | | | | | S0214: 1, H0328: 1, | | |
| | | | | | | | H0033: 1, H0417: 1, | | |
| | | | | | | | H0553: 1, H0628: 1, | | |
| | | | | | | | H0617: 1, H0606: 1, | | |
| | | | | | | | H0383: 1, H0212: 1, | | |
| | | | | | | | H0388: 1, H0135: 1, | | |
| | | | | | | | H0040: 1, H0487: 1, | | |
| | | | | | | | H0413: 1, T0069: 1, | | |
| | | | | | | | H0560: 1, H0538: 1, | | |
| | | | | | | | S0210: 1, L0763: 1, | | |
| | | | | | | | L0646: 1, L0641: 1, | | |
| | | | | | | | L0649: 1, L0803: 1, | | |
| | | | | | | | L0652: 1, L0629: 1, | | |
| | | | | | | | L0659: 1, L0787: 1, | | |
| | | | | | | | L0665: 1, H0435: 1, | | |
| | | | | | | | H0528: 1, H0521: 1, | | |
| | | | | | | | H0555: 1, L0779: 1, | | |
| | | | | | | | L0581: 1, S0276: 1 and | | |
| | | | | | | | H0008: 1. | | |
| 72 | HSQBF66 | 560726 | 82 | 229-429 | 189 | | S0026: 1 | | |
| 73 | HSRFD18 | 840771 | 83 | 67-153 | 190 | | L0754: 10, S0422: 5, | 1 | |
| | | | | | | | S0022: 4, L0803: 4, | | |
| | | | | | | | L0748: 4, L0747: 4, | | |
| | | | | | | | L0591: 4, H0486: 3, | | |
| | | | | | | | L0766: 3, L0805: 3, | | |
| | | | | | | | L0526: 3, L0665: 3, | | |
| | | | | | | | S0434: 3, S0212: 2, | | |
| | | | | | | | S0444: 2, S0360: 2, | | |
| | | | | | | | S0222: 2, L3816: 2, | | |
| | | | | | | | H0013: 2, H0596: 2, | | |
| | | | | | | | L0471: 2, H0166: 2, | | |
| | | | | | | | H0591: 2, H0509: 2, | | |
| | | | | | | | L0646: 2, L0662: 2, | | |
| | | | | | | | L0659: 2, L0666: 2, | | |
| | | | | | | | L0664: 2, S0374: 2, | | |
| | | | | | | | L0779: 2, L0777: 2, | | |
| | | | | | | | L0759: 2, S0436: 2, | | |
| | | | | | | | H0624: 1, H0170: 1, | | |
| | | | | | | | S0114: 1, S0001: 1, | | |
| | | | | | | | H0671: 1, H0663: 1, | | |
| | | | | | | | H0402: 1, H0305: 1, | | |
| | | | | | | | S0442: 1, S0408: 1, | | |
| | | | | | | | H0329: 1, H0742: 1, | | |
| | | | | | | | L3387: 1, H0581: 1, | | |
| | | | | | | | H0421: 1, H0194: 1, | | |
| | | | | | | | H0263: 1, H0597: 1, | | |
| | | | | | | | H0569: 1, H0355: 1, | | |
| | | | | | | | H0510: 1, H0179: 1, | | |
| | | | | | | | H0687: 1, H0615: 1, | | |
| | | | | | | | L0483: 1, H0553: 1, | | |
| | | | | | | | H0644: 1, H0673: 1, | | |
| | | | | | | | H0674: 1, H0100: 1, | | |
| | | | | | | | S0450: 1, H0714: 1, | | |
| | | | | | | | L0763: 1, L0770: 1, | | |
| | | | | | | | L0761: 1, L0649: 1, | | |
| | | | | | | | L0776: 1, L0518: 1, | | |
| | | | | | | | L0790: 1, L0791: 1, | | |
| | | | | | | | L0792: 1, L0663: 1, | | |
| | | | | | | | H0547: 1, H0670: 1, | | |
| | | | | | | | H0521: 1, H0696: 1, | | |
| | | | | | | | S0406: 1, H0555: 1, | | |
| | | | | | | | H0478: 1, L0780: 1, | | |
| | | | | | | | H0707: 1, S0276: 1 and | | |
| | | | | | | | H0543: 1. | | |
| 74 | HSWBE76 | 751308 | 84 | 380-559 | 191 | | L0777: 4, L0751: 3, | | |
| | | | | | | | L0747: 3, L0648: 2, | | |
| | | | | | | | L0779: 2, L0753: 2, | | |
| | | | | | | | S0342: 1, H0484: 1, | | |
| | | | | | | | H0661: 1, S0358: 1, | | |
| | | | | | | | L0009: 1, H0411: 1, | | |
| | | | | | | | S6014: 1, H0546: 1, | | |
| | | | | | | | H0123: 1, H0188: 1, | | |
| | | | | | | | S0366: 1, H0413: 1, | | |
| | | | | | | | S0344: 1, H0529: 1, | | |
| | | | | | | | L0769: 1, L0627: 1, | | |
| | | | | | | | L0774: 1, L0378: 1, | | |
| | | | | | | | L0776: 1, L0655: 1, | | |
| | | | | | | | L0663: 1, S0380: 1, | | |
| | | | | | | | H0478: 1, L0743: 1, | | |
| | | | | | | | L0750: 1 and S0196: 1. | | |
| 75 | HT3BF49 | 838620 | 85 | 306-320 | 192 | | H0271: 2, L0791: 2, | 6 | |
| | | | | | | | L0439: 2, H0159: 1, | | |
| | | | | | | | H0561: 1, L0774: 1, | | |
| | | | | | | | S0052: 1 and L0779: 1. | | |
| 76 | HTEEW69 | 764835 | 86 | 182-1153 | 193 | Asp-63 to Thr-70, | H0038: 8, H0616: 4, | | |
| | | | | | | Asn-77 to Ser-86, | L0779: 3, L0758: 3, | | |
| | | | | | | Thr-101 to Arg-108, | L0753: 2, L0032: 1, | | |
| | | | | | | Pro-117 to Asn-123, | T0006: 1, H0040: 1, | | |
| | | | | | | GLy-194 to Trp-203. | L0768: 1 and H0547: 1. | | |
| 77 | HTEHU59 | 840385 | 87 | 170-274 | 194 | Ser-29 to Phe-34. | S0422: 6, H0038: 4, | 11 | |
| | | | | | | | L0758: 4, L0754: 3, | | |
| | | | | | | | S0360: 2, H0024: 2, | | |
| | | | | | | | L0598: 2, L0766: 2, | | |
| | | | | | | | L0748: 2, L0747: 2, | | |
| | | | | | | | L0756: 2, H0583: 1, | | |
| | | | | | | | H0341: 1, S0418: 1, | | |
| | | | | | | | L0005: 1, H0741: 1, | | |
| | | | | | | | H0437: 1, H0369: 1, | | |
| | | | | | | | H0581: 1, H0194: 1, | | |
| | | | | | | | S0050: 1, H0271: 1, | | |
| | | | | | | | H0428: 1, T0006: 1, | | |
| | | | | | | | H0068: 1, H0412: 1, | | |
| | | | | | | | H0056: 1, H0494: 1, | | |
| | | | | | | | S0426: 1, L0772: 1, | | |
| | | | | | | | L0646: 1, L0662: 1, | | |
| | | | | | | | L0803: 1, L0806: 1, | | |
| | | | | | | | L0776: 1, L0655: 1, | | |
| | | | | | | | L0789: 1, L0792: 1, | | |
| | | | | | | | H0144: 1, S0374: 1, | | |
| | | | | | | | H0670: 1, H0627: 1, | | |
| | | | | | | | S0026: 1 and S0192: 1. | | |
| 78 | HTEMQ17 | 840387 | 88 | 446-484 | 195 | | L0748: 6, L0766: 4, | | |
| | | | | | | | H0038: 3, H0616: 3, | | |
| | | | | | | | H0056: 2, H0529: 2, | | |
| | | | | | | | H0519: 2, H0624: 1, | | |
| | | | | | | | H0662: 1, S0418: 1, | | |
| | | | | | | | S0360: 1, H0749: 1, | | |
| | | | | | | | H0013: 1, H0581: 1, | | |
| | | | | | | | S0388: 1, H0266: 1, | | |
| | | | | | | | H0591: 1, H0087: 1, | | |
| | | | | | | | H0413: 1, H0561: 1, | | |
| | | | | | | | S0438: 1, S0422: 1, | | |
| | | | | | | | L0520: 1, L0769: 1, | | |
| | | | | | | | L0794: 1, L0775: 1, | | |
| | | | | | | | L0666: 1, L0663: 1, | | |
| | | | | | | | H0547: 1, S0152: 1, | | |
| | | | | | | | L0740: 1, L0777: 1, | | |
| | | | | | | | L0753: 1, L0758: 1, | | |
| | | | | | | | L0608: 1 and H0542: 1. | | |
| 79 | HTGBK95 | 834490 | 89 | 271-321 | 196 | | L0777: 5, S0444: 3, | | |
| | | | | | | | L0766: 3, L0803: 3, | | |
| | | | | | | | L0439: 3, S0360: 2, | | |
| | | | | | | | L0598: 2, L0666: 2, | | |
| | | | | | | | L0748: 2, T0049: 1, | | |
| | | | | | | | S0134: 1, S0116: 1, | | |
| | | | | | | | S0408: 1, L0717: 1, | | |
| | | | | | | | H0586: 1, H0486: 1, | | |
| | | | | | | | H0575: 1, H0510: 1, | | |
| | | | | | | | H0553: 1, H0560: 1, | | |
| | | | | | | | S0422: 1, L0763: 1, | | |
| | | | | | | | L0769: 1, L0521: 1, | | |
| | | | | | | | L0767: 1, L0768: 1, | | |
| | | | | | | | L0775: 1, L0663: 1, | | |
| | | | | | | | S0374: 1, L0438: 1, | | |
| | | | | | | | H0520: 1, H0682: 1, | | |
| | | | | | | | S0328: 1, S0406: 1, | | |
| | | | | | | | L0740: 1, S0192: 1 and | | |
| | | | | | | | H0543: 1. | | |
| 80 | HTLEM16 | 779133 | 90 | 1220-1429 | 197 | Arg-29 to Cys-43. | L0439: 31, L0741: 24, | | |
| | | | | | | | H0056: 13, L0748: 12, | | |
| | | | | | | | H0052: 9, H0521: 9, | | |
| | | | | | | | L0776: 8, L0744: 8, | | |
| | | | | | | | L0438: 7, L0754: 7, | | |
| | | | | | | | S0474: 6, L0766: 6, | | |
| | | | | | | | L0742: 6, L0731: 6, | | |
| | | | | | | | L0750: 5, S0278: 4, | | |
| | | | | | | | L5566: 4, L0665: 4, | | |
| | | | | | | | H0522: 4, H0556: 3, | | |
| | | | | | | | H0716: 3, H0657: 3, | | |
| | | | | | | | S0358: 3, H0580: 3, | | |
| | | | | | | | H0599: 3, S0049: 3, | | |
| | | | | | | | H0009: 3, H0553: 3, | | |
| | | | | | | | H0641: 3, S0142: 3, | | |
| | | | | | | | L0764: 3, L0659: 3, | | |
| | | | | | | | L0666: 3, S0126: 3, | | |
| | | | | | | | L0751: 3, H0717: 2, | | |
| | | | | | | | H0656: 2, S0029: 2, | | |
| | | | | | | | S0420: 2, S0360: 2, | | |
| | | | | | | | S0007: 2, H0497: 2, | | |
| | | | | | | | H0486: 2, H0618: 2, | | |
| | | | | | | | H0253: 2, H0581: 2, | | |
| | | | | | | | H0046: 2, S0388: 2, | | |
| | | | | | | | T0010: 2, H0039: 2, | | |
| | | | | | | | H0424: 2, L0456: 2, | | |
| | | | | | | | S0036: 2, H0135: 2, | | |
| | | | | | | | H0551: 2, H0623: 2, | | |
| | | | | | | | H0494: 2, S0002: 2, | | |
| | | | | | | | L0770: 2, L0796: 2, | | |
| | | | | | | | L5575: 2, L5565: 2, | | |
| | | | | | | | L0761: 2, L0662: 2, | | |
| | | | | | | | L0650: 2, L0383: 2, | | |
| | | | | | | | L0663: 2, H0682: 2, | | |
| | | | | | | | L0758: 2, S0434: 2, | | |
| | | | | | | | L0596: 2, L0581: 2, | | |
| | | | | | | | S0242: 2, S0114: 1, | | |
| | | | | | | | H0583: 1, L0422: 1, | | |
| | | | | | | | S0116: 1, H0662: 1, | | |
| | | | | | | | H0305: 1, S0418: 1, | | |
| | | | | | | | L0005: 1, S0444: 1, | | |
| | | | | | | | S0046: 1, S0476: 1, | | |
| | | | | | | | H0645: 1, H0437: 1, | | |
| | | | | | | | H0261: 1, H0392: 1, | | |
| | | | | | | | H0600: 1, H0586: 1, | | |
| | | | | | | | H0574: 1, L0623: 1, | | |
| | | | | | | | H0013: 1, H0250: 1, | | |
| | | | | | | | H0427: 1, H0002: 1, | | |
| | | | | | | | H0575: 1, T0082: 1, | | |
| | | | | | | | H0590: 1, S0010: 1, | | |
| | | | | | | | H0390: 1, T0048: 1, | | |
| | | | | | | | H0318: 1, H0421: 1, | | |
| | | | | | | | H0251: 1, H0232: 1, | | |
| | | | | | | | H0546: 1, H0150: 1, | | |
| | | | | | | | H0041: 1, H0178: 1, | | |
| | | | | | | | H0569: 1, H0620: 1, | | |
| | | | | | | | H0051: 1, S0051: 1, | | |
| | | | | | | | H0510: 1, H0416: 1, | | |
| | | | | | | | H0188: 1, S0312: 1, | | |
| | | | | | | | S0314: 1, H0622: 1, | | |
| | | | | | | | H0213: 1, H0031: 1, | | |
| | | | | | | | L0143: 1, H0032: 1, | | |
| | | | | | | | L0455: 1, S0366: 1, | | |
| | | | | | | | H0038: 1, H0087: 1, | | |
| | | | | | | | H0264: 1, H0268: 1, | | |
| | | | | | | | H0022: 1, H0560: 1, | | |
| | | | | | | | H0625: 1, H0561: 1, | | |
| | | | | | | | S0438: 1, H0509: 1, | | |
| | | | | | | | H0633: 1, H0649: 1, | | |
| | | | | | | | S0144: 1, S0208: 1, | | |
| | | | | | | | H0529: 1, L0769: 1, | | |
| | | | | | | | L0637: 1, L0667: 1, | | |
| | | | | | | | L5568: 1, L0774: 1, | | |
| | | | | | | | L0375: 1, L0805: 1, | | |
| | | | | | | | L0653: 1, L0654: 1, | | |
| | | | | | | | L0661: 1, L0807: 1, | | |
| | | | | | | | L0527: 1, L0382: 1, | | |
| | | | | | | | L0809: 1, L0793: 1, | | |
| | | | | | | | S0006: 1, S0428: 1, | | |
| | | | | | | | S0053: 1, S0310: 1, | | |
| | | | | | | | L0352: 1, H0547: 1, | | |
| | | | | | | | H0684: 1, H0670: 1, | | |
| | | | | | | | H0660: 1, S0152: 1, | | |
| | | | | | | | H0696: 1, S0406: 1, | | |
| | | | | | | | H0555: 1, H0436: 1, | | |
| | | | | | | | S3014: 1, L0743: 1, | | |
| | | | | | | | L0745: 1, L0747: 1, | | |
| | | | | | | | L0749: 1, L0756: 1, | | |
| | | | | | | | L0753: 1, L0755: 1, | | |
| | | | | | | | H0445: 1, S0436: 1, | | |
| | | | | | | | L0485: 1, H0667: 1, | | |
| | | | | | | | H0216: 1, H0543: 1, | | |
| | | | | | | | H0422: 1 and H0008: 1. | | |
| 81 | HTNBK13 | 831967 | 91 | 534-599 | 198 | | L0779: 5, L0731: 4, | | |
| | | | | | | | L0593: 4, H0046: 3, | | |
| | | | | | | | L0776: 3, L0666: 3, | | |
| | | | | | | | H0031: 2, L0772: 2, | | |
| | | | | | | | L0774: 2, L0805: 2, | | |
| | | | | | | | H0670: 2, L0439: 2, | | |
| | | | | | | | L0754: 2, L0777: 2, | | |
| | | | | | | | L0758: 2, L0590: 2, | | |
| | | | | | | | T0002: 1, L0717: 1, | | |
| | | | | | | | H0632: 1, L0622: 1, | | |
| | | | | | | | T0082: 1, H0581: 1, | | |
| | | | | | | | H0263: 1, T0115: 1, | | |
| | | | | | | | H0597: 1, L0471: 1, | | |
| | | | | | | | H0012: 1, H0620: 1, | | |
| | | | | | | | H0163: 1, T0067: 1, | | |
| | | | | | | | L0770: 1, L0637: 1, | | |
| | | | | | | | L0388: 1, L0657: 1, | | |
| | | | | | | | L0382: 1, L0664: 1, | | |
| | | | | | | | S0126: 1, H0660: 1, | | |
| | | | | | | | S0378: 1, H0521: 1, | | |
| | | | | | | | L0747: 1, L0750: 1, | | |
| | | | | | | | L0756: 1, L0752: 1, | | |
| | | | | | | | L0755: 1, L0759: 1, | | |
| | | | | | | | S0031: 1, L0599: 1 and | | |
| | | | | | | | L0603: 1. | | |
| 82 | HTODN35 | 570901 | 92 | 67-111 | 199 | | H0264: 1 | | |
| 83 | HTPDU17 | 840596 | 93 | 52-153 | 200 | | H0677: 19, L0759: 6, | | |
| | | | | | | | L0748: 5, H0040: 4, | | |
| | | | | | | | L0438: 3, L0754: 3, | | |
| | | | | | | | L0750: 3, L0777: 3, | | |
| | | | | | | | H0255: 2, H0617: 2, | | |
| | | | | | | | H0038: 2, H0529: 2, | | |
| | | | | | | | L0769: 2, L0761: 2, | | |
| | | | | | | | L0662: 2, L0666: 2, | | |
| | | | | | | | S0406: 2, L0749: 2, | | |
| | | | | | | | L0758: 2, L0595: 2, | | |
| | | | | | | | H0265: 1, H0556: 1, | | |
| | | | | | | | H0717: 1, S0134: 1, | | |
| | | | | | | | H0650: 1, H0657: 1, | | |
| | | | | | | | S0358: 1, S0444: 1, | | |
| | | | | | | | S0410: 1, S0045: 1, | | |
| | | | | | | | H0411: 1, H0392: 1, | | |
| | | | | | | | L0468: 1, H0587: 1, | | |
| | | | | | | | H0013: 1, H0069: 1, | | |
| | | | | | | | H0635: 1, H0575: 1, | | |
| | | | | | | | H0618: 1, H0581: 1, | | |
| | | | | | | | H0564: 1, H0569: 1, | | |
| | | | | | | | S6028: 1, H0266: 1, | | |
| | | | | | | | H0252: 1, H0615: 1, | | |
| | | | | | | | H0039: 1, H0031: 1, | | |
| | | | | | | | H0634: 1, H0100: 1, | | |
| | | | | | | | H0494: 1, H0334: 1, | | |
| | | | | | | | H0561: 1, S0150: 1, | | |
| | | | | | | | S0422: 1, L0667: 1, | | |
| | | | | | | | L0646: 1, L0800: 1, | | |
| | | | | | | | L0771: 1, L0661: 1, | | |
| | | | | | | | L0809: 1, L0790: 1, | | |
| | | | | | | | L0792: 1, L0663: 1, | | |
| | | | | | | | L0665: 1, S0374: 1, | | |
| | | | | | | | H0547: 1, H0519: 1, | | |
| | | | | | | | H0593: 1, H0672: 1, | | |
| | | | | | | | H0518: 1, H0521: 1, | | |
| | | | | | | | H0555: 1, H0436: 1, | | |
| | | | | | | | L0439: 1, L0779: 1, | | |
| | | | | | | | L0731: 1 and L0757: 1. | | |
| 84 | HTTDN24 | 766485 | 94 | 1024-1728 | 201 | Asp-194 to Leu-199, | | | |
| | | | | | | Ile-206 to Pro-211, | | | |
| | | | | | | Glu-224 to Ser-229. | | | |
| 85 | HTTEE41 | 840950 | 95 | 1171-1197 | 202 | | H0040: 17, H0251: 14, | 12 | |
| | | | | | | | L0758: 10, L0748: 8, | | |
| | | | | | | | L0731: 8, H0494: 7, | | |
| | | | | | | | L0666: 7, H0144: 7, | | |
| | | | | | | | H0659: 7, L0747: 7, | | |
| | | | | | | | L0749: 7, L0757: 7, | | |
| | | | | | | | H0038: 6, H0529: 6, | | |
| | | | | | | | L0770: 6, L0662: 6, | | |
| | | | | | | | L0659: 6, H0013: 5, | | |
| | | | | | | | H0318: 5, H0616: 5, | | |
| | | | | | | | S0440: 5, L0775: 5, | | |
| | | | | | | | L0776: 5, H0519: 5, | | |
| | | | | | | | L0588: 5, L0592: 5, | | |
| | | | | | | | H0341: 4, S0360: 4, | | |
| | | | | | | | H0412: 4, L0663: 4, | | |
| | | | | | | | H0547: 4, L0754: 4, | | |
| | | | | | | | L0595: 4, H0542: 4, | | |
| | | | | | | | H0543: 4, H0423: 4, | | |
| | | | | | | | H0171: 3, H0657: 3, | | |
| | | | | | | | H0656: 3, S0045: 3, | | |
| | | | | | | | L3388: 3, H0581: 3, | | |
| | | | | | | | S0049: 3, T0110: 3, | | |
| | | | | | | | H0046: 3, H0090: 3, | | |
| | | | | | | | H0591: 3, H0551: 3, | | |
| | | | | | | | H0100: 3, H0022: 3, | | |
| | | | | | | | H0625: 3, H0633: 3, | | |
| | | | | | | | S0422: 3, L0375: 3, | | |
| | | | | | | | L0664: 3, H0682: 3, | | |
| | | | | | | | S0406: 3, L0740: 3, | | |
| | | | | | | | H0556: 2, H0241: 2, | | |
| | | | | | | | H0638: 2, S0418: 2, | | |
| | | | | | | | L0005: 2, S0442: 2, | | |
| | | | | | | | S0376: 2, H0722: 2, | | |
| | | | | | | | H0393: 2, L0717: 2, | | |
| | | | | | | | S0222: 2, H0574: 2, | | |
| | | | | | | | H0486: 2, T0040: 2, | | |
| | | | | | | | L0471: 2, S0051: 2, | | |
| | | | | | | | S0003: 2, H0252: 2, | | |
| | | | | | | | L0483: 2, T0006: 2, | | |
| | | | | | | | H0031: 2, H0032: 2, | | |
| | | | | | | | H0124: 2, H0634: 2, | | |
| | | | | | | | H0264: 2, T0042: 2, | | |
| | | | | | | | S0150: 2, H0646: 2, | | |
| | | | | | | | L0763: 2, L0637: 2, | | |
| | | | | | | | L0646: 2, L0374: 2, | | |
| | | | | | | | L0764: 2, L0768: 2, | | |
| | | | | | | | L0653: 2, L0665: 2, | | |
| | | | | | | | H0593: 2, H0435: 2, | | |
| | | | | | | | H0658: 2, H0539: 2, | | |
| | | | | | | | S0152: 2, L3832: 2, | | |
| | | | | | | | H0521: 2, S3014: 2, | | |
| | | | | | | | S0027: 2, S0028: 2, | | |
| | | | | | | | L0439: 2, L0750: 2, | | |
| | | | | | | | L0777: 2, S0436: 2, | | |
| | | | | | | | L0596: 2, L0608: 2, | | |
| | | | | | | | L0604: 2, L0594: 2, | | |
| | | | | | | | L0362: 2, S0026: 2, | | |
| | | | | | | | H0667: 2, S0452: 2, | | |
| | | | | | | | H0506: 2, L0411: 1, | | |
| | | | | | | | H0624: 1, H0170: 1, | | |
| | | | | | | | H0395: 1, H0265: 1, | | |
| | | | | | | | T0002: 1, H0220: 1, | | |
| | | | | | | | H0140: 1, H0159: 1, | | |
| | | | | | | | H0686: 1, H0583: 1, | | |
| | | | | | | | H0650: 1, S0212: 1, | | |
| | | | | | | | H0484: 1, H0664: 1, | | |
| | | | | | | | L0481: 1, S0356: 1, | | |
| | | | | | | | S0354: 1, S0358: 1, | | |
| | | | | | | | S0444: 1, S0408: 1, | | |
| | | | | | | | L3649: 1, H0580: 1, | | |
| | | | | | | | H0747: 1, H0437: 1, | | |
| | | | | | | | H0431: 1, T0104: 1, | | |
| | | | | | | | H0600: 1, H0592: 1, | | |
| | | | | | | | H0586: 1, L3817: 1, | | |
| | | | | | | | H0642: 1, H0632: 1, | | |
| | | | | | | | L2482: 1, T0114: 1, | | |
| | | | | | | | H0244: 1, H0250: 1, | | |
| | | | | | | | H0069: 1, H0156: 1, | | |
| | | | | | | | L0021: 1, H0599: 1, | | |
| | | | | | | | H0036: 1, S0346: 1, | | |
| | | | | | | | H0596: 1, H0544: 1, | | |
| | | | | | | | H0009: 1, N0006: 1, | | |
| | | | | | | | L0157: 1, H0569: 1, | | |
| | | | | | | | H0123: 1, H0242: 1, | | |
| | | | | | | | H0024: 1, H0083: 1, | | |
| | | | | | | | H0375: 1, H0328: 1, | | |
| | | | | | | | H0615: 1, H0428: 1, | | |
| | | | | | | | H0039: 1, H0622: 1, | | |
| | | | | | | | H0213: 1, H0553: 1, | | |
| | | | | | | | L0142: 1, H0628: 1, | | |
| | | | | | | | H0674: 1, H0388: 1, | | |
| | | | | | | | L0456: 1, H0708: 1, | | |
| | | | | | | | H0068: 1, H0598: 1, | | |
| | | | | | | | S0036: 1, H0135: 1, | | |
| | | | | | | | H0087: 1, H0380: 1, | | |
| | | | | | | | H0413: 1, H0056: 1, | | |
| | | | | | | | L0351: 1, T0041: 1, | | |
| | | | | | | | H0334: 1, H0561: 1, | | |
| | | | | | | | H0366: 1, S0448: 1, | | |
| | | | | | | | S0294: 1, H0130: 1, | | |
| | | | | | | | H0641: 1, H0649: 1, | | |
| | | | | | | | S0208: 1, S0002: 1, | | |
| | | | | | | | S0426: 1, L0520: 1, | | |
| | | | | | | | L0631: 1, L0769: 1, | | |
| | | | | | | | L0638: 1, L5565: 1, | | |
| | | | | | | | L0667: 1, L0772: 1, | | |
| | | | | | | | L0372: 1, L0641: 1, | | |
| | | | | | | | L0626: 1, L0794: 1, | | |
| | | | | | | | L0766: 1, L0381: 1, | | |
| | | | | | | | L0650: 1, L0651: 1, | | |
| | | | | | | | L0806: 1, L0655: 1, | | |
| | | | | | | | L0807: 1, L0657: 1, | | |
| | | | | | | | L0636: 1, L0518: 1, | | |
| | | | | | | | L0782: 1, L0382: 1, | | |
| | | | | | | | L0809: 1, L3391: 1, | | |
| | | | | | | | L2263: 1, L2259: 1, | | |
| | | | | | | | L2262: 1, L0565: 1, | | |
| | | | | | | | H0693: 1, L3827: 1, | | |
| | | | | | | | H0520: 1, S0126: 1, | | |
| | | | | | | | H0689: 1, H0670: 1, | | |
| | | | | | | | H0660: 1, H0666: 1, | | |
| | | | | | | | H0648: 1, L0602: 1, | | |
| | | | | | | | H0710: 1, H0518: 1, | | |
| | | | | | | | S0176: 1, H0134: 1, | | |
| | | | | | | | H0555: 1, H0436: 1, | | |
| | | | | | | | H0478: 1, H0631: 1, | | |
| | | | | | | | L0779: 1, L0752: 1, | | |
| | | | | | | | S0434: 1, L0605: 1, | | |
| | | | | | | | L0591: 1, L0599: 1, | | |
| | | | | | | | H0665: 1, S0196: 1, | | |
| | | | | | | | L2368: 1, H0008: 1 and | | |
| | | | | | | | H0352: 1. | | |
| 86 | HTXJD85 | 840391 | 96 | 211-306 | 203 | | H0556: 2, L0638: 1, | 3 | |
| | | | | | | | L0748: 1 and L0439: 1. | | |
| 87 | HUVDJ48 | 564853 | 97 | 196-213 | 204 | | H0393: 1, H0056: 1 and | | |
| | | | | | | | L0662: 1. | | |
| 88 | HWBBU75 | 780360 | 98 | 783-938 | 205 | Ser-17 to Gly-22, | L0665: 4, H0457: 3, | | |
| | | | | | | Leu-34 to Ala-42. | H0264: 3, L0766: 3, | | |
| | | | | | | | H0521: 3, L0745: 3, | | |
| | | | | | | | H0556: 2, H0580: 2, | | |
| | | | | | | | S0352: 2, L0761: 2, | | |
| | | | | | | | L0806: 2, L0789: 2, | | |
| | | | | | | | L0748: 2, H0542: 2, | | |
| | | | | | | | H0255: 1, S0278: 1, | | |
| | | | | | | | H0581: 1, H0271: 1, | | |
| | | | | | | | H0719: 1, H0413: 1, | | |
| | | | | | | | H0494: 1, S0002: 1, | | |
| | | | | | | | S0426: 1, L0769: 1, | | |
| | | | | | | | L0774: 1, H0660: 1, | | |
| | | | | | | | L0750: 1, L0752: 1, | | |
| | | | | | | | L0753: 1 and S0424: 1. | | |
| 89 | HWHPB78 | 740778 | 99 | 200-400 | 206 | Gln-25 to Leu-30. | H0437: 2, L0769: 2, | 1 | |
| | | | | | | | S0028: 2, L0439: 2, | | |
| | | | | | | | S0436: 2, H0556: 1, | | |
| | | | | | | | H0125: 1, S0420: 1, | | |
| | | | | | | | H0619: 1, H0587: 1, | | |
| | | | | | | | H0635: 1, H0253: 1, | | |
| | | | | | | | H0318: 1, H0744: 1, | | |
| | | | | | | | H0052: 1, H0009: 1, | | |
| | | | | | | | H0172: 1, H0266: 1, | | |
| | | | | | | | H0135: 1, H0494: 1, | | |
| | | | | | | | L3905: 1, L0438: 1, | | |
| | | | | | | | L3828: 1, H0547: 1, | | |
| | | | | | | | H0539: 1, H0521: 1, | | |
| | | | | | | | S0037: 1, L0593: 1, | | |
| | | | | | | | H0506: 1 and H0008: 1. | | |
| 90 | HWLBO67 | 834315 | 100 | 42-161 | 207 | | S0374: 1 | 2 | |
| 91 | HWLGP26 | 834770 | 101 | 1091-1306 | 208 | Pro-26 to Met-35. | L0766: 5, L0803: 5, | | |
| | | | | | | | L0794: 3, S0410: 2, | | |
| | | | | | | | H0551: 2, H0435: 2, | | |
| | | | | | | | L0756: 2, L0731: 2, | | |
| | | | | | | | H0585: 1, S0212: 1, | | |
| | | | | | | | S0282: 1, L0534: 1, | | |
| | | | | | | | S0442: 1, S0354: 1, | | |
| | | | | | | | H0735: 1, H0486: 1, | | |
| | | | | | | | H0014: 1, H0354: 1, | | |
| | | | | | | | H0644: 1, H0135: 1, | | |
| | | | | | | | H0647: 1, L0369: 1, | | |
| | | | | | | | L0640: 1, L0763: 1, | | |
| | | | | | | | L0770: 1, L3905: 1, | | |
| | | | | | | | L0646: 1, L0771: 1, | | |
| | | | | | | | L0804: 1, L0784: 1, | | |
| | | | | | | | L0528: 1, L0789: 1, | | |
| | | | | | | | L0790: 1, L0792: 1, | | |
| | | | | | | | L3827: 1, H0658: 1, | | |
| | | | | | | | L0749: 1, L0758: 1 and | | |
| | | | | | | | S0436: 1. | | |
| 92 | HILCA24 | 869856 | 102 | 191-1174 | 209 | Gln-52 to Arg-57, | L0748: 4, H0090: 2, | | |
| | | | | | | Glu-74 to Leu-84, | L0659: 2, H0521: 2, | | |
| | | | | | | Val-104 to Asp-110, | L0777: 2, L0608: 2, | | |
| | | | | | | Gly-157 to Gly-163, | H0543: 2, T0002: 1, | | |
| | | | | | | Asn-185 to Ser-195, | S0114: 1, L3658: 1, | | |
| | | | | | | Arg-245 to Asp-250, | S0358: 1, S0408: 1, | | |
| | | | | | | Pro-302 to Pro-310, | L3649: 1, T0109: 1, | | |
| | | | | | | Thr-316 to Tyr-322. | H0581: 1, H0622: 1, | | |
| | | | | | | | H0031: 1, H0644: 1, | | |
| | | | | | | | S0002: 1, L0657: 1, | | |
| | | | | | | | L0526: 1, L0789: 1, | | |
| | | | | | | | L0664: 1, S0380: 1, | | |
| | | | | | | | H0522: 1, L0749: 1 and | | |
| | | | | | | | L0779: 1. | | |
| | HILCA24 | 782450 | 110 | 189-1172 | 217 | Gln-52 to Arg-57, | | | |
| | | | | | | Glu-74 to Leu-84, | | | |
| | | | | | | Val-104 to Asp-110, | | | |
| | | | | | | Gly-157 to Gly-163, | | | |
| | | | | | | Asn-185 to Ser-195, | | | |
| | | | | | | Arg-245 to Asp-250, | | | |
| | | | | | | Pro-302 to Pro-310, | | | |
| | | | | | | Thr-316 to Tyr-322. | | | |
| 93 | HE2CA60 | 888705 | 103 | 1731-1754 | 210 | | H0305: 16, L0777: 11, | 17 | |
| | | | | | | | L0471: 10, S0422: 9, | | |
| | | | | | | | L0766: 9, H0624: 8, | | |
| | | | | | | | H0013: 7, H0170: 6, | | |
| | | | | | | | L2551: 6, H0046: 6, | | |
| | | | | | | | L0665: 6, L0598: 5, | | |
| | | | | | | | L0662: 5, L0776: 5, | | |
| | | | | | | | H0547: 5, L0758: 5, | | |
| | | | | | | | L0589: 5, H0171: 4, | | |
| | | | | | | | L0659: 4, L0666: 4, | | |
| | | | | | | | L0663: 4, L0756: 4, | | |
| | | | | | | | L0731: 4, S0358: 3, | | |
| | | | | | | | L2744: 3, L3655: 3, | | |
| | | | | | | | H0581: 3, H0457: 3, | | |
| | | | | | | | S0406: 3, L0744: 3, | | |
| | | | | | | | L0439: 3, L0752: 3, | | |
| | | | | | | | S0436: 3, H0542: 3, | | |
| | | | | | | | H0543: 3, L3643: 2, | | |
| | | | | | | | H0650: 2, H0657: 2, | | |
| | | | | | | | S0116: 2, S0442: 2, | | |
| | | | | | | | S0354: 2, L0717: 2, | | |
| | | | | | | | S0414: 2, H0486: 2, | | |
| | | | | | | | T0040: 2, H0318: 2, | | |
| | | | | | | | H0421: 2, H0428: 2, | | |
| | | | | | | | H0553: 2, H0090: 2, | | |
| | | | | | | | H0040: 2, H0063: 2, | | |
| | | | | | | | H0641: 2, L0769: 2, | | |
| | | | | | | | L0761: 2, L0764: 2, | | |
| | | | | | | | L0650: 2, L0774: 2, | | |
| | | | | | | | L0805: 2, L0657: 2, | | |
| | | | | | | | H0144: 2, L3811: 2, | | |
| | | | | | | | L3832: 2, H0521: 2, | | |
| | | | | | | | S0404: 2, L0741: 2, | | |
| | | | | | | | L0740: 2, L0747: 2, | | |
| | | | | | | | L0759: 2, S0434: 2, | | |
| | | | | | | | L0362: 2, H0685: 1, | | |
| | | | | | | | S0218: 1, L0785: 1, | | |
| | | | | | | | H0341: 1, H0255: 1, | | |
| | | | | | | | H0663: 1, H0662: 1, | | |
| | | | | | | | H0402: 1, S0376: 1, | | |
| | | | | | | | S0360: 1, S0410: 1, | | |
| | | | | | | | L3645: 1, L3646: 1, | | |
| | | | | | | | H0637: 1, H0741: 1, | | |
| | | | | | | | H0722: 1, H0735: 1, | | |
| | | | | | | | S0046: 1, H0749: 1, | | |
| | | | | | | | S0300: 1, L2758: 1, | | |
| | | | | | | | L2767: 1, L3388: 1, | | |
| | | | | | | | S0222: 1, H0592: 1, | | |
| | | | | | | | H0586: 1, H0587: 1, | | |
| | | | | | | | H0559: 1, L3653: 1, | | |
| | | | | | | | H0427: 1, L0021: 1, | | |
| | | | | | | | H0037: 1, H0746: 1, | | |
| | | | | | | | H0263: 1, H0544: 1, | | |
| | | | | | | | H0050: 1, H0057: 1, | | |
| | | | | | | | L0163: 1, H0051: 1, | | |
| | | | | | | | S0022: 1, H0328: 1, | | |
| | | | | | | | T0023: 1, H0673: 1, | | |
| | | | | | | | H0674: 1, H0591: 1, | | |
| | | | | | | | H0038: 1, H0551: 1, | | |
| | | | | | | | T0067: 1, H0100: 1, | | |
| | | | | | | | L0065: 1, S0440: 1, | | |
| | | | | | | | H0649: 1, H0529: 1, | | |
| | | | | | | | L0369: 1, L0763: 1, | | |
| | | | | | | | L0667: 1, L0630: 1, | | |
| | | | | | | | L0372: 1, L0521: 1, | | |
| | | | | | | | L0533: 1, L0775: 1, | | |
| | | | | | | | L0651: 1, L0806: 1, | | |
| | | | | | | | L0655: 1, L0661: 1, | | |
| | | | | | | | L0807: 1, L0656: 1, | | |
| | | | | | | | L0809: 1, L3872: 1, | | |
| | | | | | | | L0790: 1, L0664: 1, | | |
| | | | | | | | L2655: 1, L3663: 1, | | |
| | | | | | | | S0374: 1, L2706: 1, | | |
| | | | | | | | H0520: 1, H0435: 1, | | |
| | | | | | | | H0660: 1, H0672: 1, | | |
| | | | | | | | S0328: 1, H0539: 1, | | |
| | | | | | | | S0380: 1, H0753: 1, | | |
| | | | | | | | S0004: 1, H0696: 1, | | |
| | | | | | | | L0748: 1, L0754: 1, | | |
| | | | | | | | L0750: 1, L0753: 1, | | |
| | | | | | | | S0031: 1, H0444: 1, | | |
| | | | | | | | L0588: 1, L0605: 1, | | |
| | | | | | | | L0485: 1, H0216: 1, | | |
| | | | | | | | S0242: 1, H0423: 1, | | |
| | | | | | | | S0458: 1 and H0721: 1. | | |
| | HE2CA60 | 770301 | 111 | 360-383 | 218 | | | | |
| 94 | HPWTF23 | 844775 | 104 | 283-675 | 211 | Val-80 to Leu-92, | S0474: 47, H0710: 28, | | |
| | | | | | | Ser-98 to Lys-104, | L0747: 18, L0659: 17, | | |
| | | | | | | Pro-111 to Pro-122. | H0656: 13, H0436: 10, | | |
| | | | | | | | H0271: 9, L0751: 9, | | |
| | | | | | | | H0581: 8, H0179: 8, | | |
| | | | | | | | H0063: 8, L0731: 8, | | |
| | | | | | | | L0599: 8, H0740: 7, | | |
| | | | | | | | L0756: 7, H0650: 6, | | |
| | | | | | | | L0662: 6, H0555: 6, | | |
| | | | | | | | S0354: 5, H0728: 5, | | |
| | | | | | | | H0733: 5, H0734: 5, | | |
| | | | | | | | H0036: 5, H0590: 5, | | |
| | | | | | | | H0052: 5, L0770: 5, | | |
| | | | | | | | S0428: 5, S0374: 5, | | |
| | | | | | | | L0439: 5, L3643: 4, | | |
| | | | | | | | H0717: 4, H0747: 4, | | |
| | | | | | | | H0393: 4, S0222: 4, | | |
| | | | | | | | H0156: 4, H0309: 4, | | |
| | | | | | | | S0312: 4, S0314: 4, | | |
| | | | | | | | H0090: 4, H0591: 4, | | |
| | | | | | | | L0637: 4, L0761: 4, | | |
| | | | | | | | L0776: 4, L0783: 4, | | |
| | | | | | | | L0438: 4, L0757: 4, | | |
| | | | | | | | H0543: 4, H0716: 3, | | |
| | | | | | | | H0662: 3, H0402: 3, | | |
| | | | | | | | H0619: 3, H0392: 3, | | |
| | | | | | | | H0575: 3, H0004: 3, | | |
| | | | | | | | H0673: 3, S0364: 3, | | |
| | | | | | | | H0135: 3, H0059: 3, | | |
| | | | | | | | H0494: 3, L0667: 3, | | |
| | | | | | | | L0764: 3, L0803: 3, | | |
| | | | | | | | L0775: 3, L0666: 3, | | |
| | | | | | | | L3811: 3, H0670: 3, | | |
| | | | | | | | L0744: 3, L0750: 3, | | |
| | | | | | | | L0779: 3, L0758: 3, | | |
| | | | | | | | L0759: 3, S0436: 3, | | |
| | | | | | | | H0556: 2, L3644: 2, | | |
| | | | | | | | H0713: 2, S6024: 2, | | |
| | | | | | | | H0341: 2, S0282: 2, | | |
| | | | | | | | S0442: 2, S0376: 2, | | |
| | | | | | | | S0360: 2, H0580: 2, | | |
| | | | | | | | H0329: 2, H0749: 2, | | |
| | | | | | | | H0645: 2, H0369: 2, | | |
| | | | | | | | H0486: 2, S0280: 2, | | |
| | | | | | | | H0042: 2, H0421: 2, | | |
| | | | | | | | H0545: 2, H0457: 2, | | |
| | | | | | | | H0620: 2, H0014: 2, | | |
| | | | | | | | S0051: 2, T0010: 2, | | |
| | | | | | | | S0340: 2, H0031: 2, | | |
| | | | | | | | H0644: 2, H0383: 2, | | |
| | | | | | | | H0674: 2, H0551: 2, | | |
| | | | | | | | H0264: 2, H0488: 2, | | |
| | | | | | | | T0004: 2, S0438: 2, | | |
| | | | | | | | H0130: 2, H0647: 2, | | |
| | | | | | | | S0422: 2, L0766: 2, | | |
| | | | | | | | L0655: 2, L0517: 2, | | |
| | | | | | | | L0518: 2, L0809: 2, | | |
| | | | | | | | L0647: 2, H0547: 2, | | |
| | | | | | | | H0660: 2, S0044: 2, | | |
| | | | | | | | S0027: 2, S0028: 2, | | |
| | | | | | | | L0748: 2, L0754: 2, | | |
| | | | | | | | L0745: 2, H0445: 2, | | |
| | | | | | | | S0434: 2, L0596: 2, | | |
| | | | | | | | L0588: 2, H0506: 2, | | |
| | | | | | | | H0170: 1, S0134: 1, | | |
| | | | | | | | L0414: 1, L0785: 1, | | |
| | | | | | | | S0212: 1, H0255: 1, | | |
| | | | | | | | S0358: 1, S0444: 1, | | |
| | | | | | | | L3649: 1, H0637: 1, | | |
| | | | | | | | H0729: 1, H0730: 1, | | |
| | | | | | | | H0741: 1, H0208: 1, | | |
| | | | | | | | S6022: 1, H0550: 1, | | |
| | | | | | | | H0609: 1, H0586: 1, | | |
| | | | | | | | H0333: 1, T0060: 1, | | |
| | | | | | | | H0427: 1, L0021: 1, | | |
| | | | | | | | L0022: 1, S0010: 1, | | |
| | | | | | | | S0346: 1, L0105: 1, | | |
| | | | | | | | H0318: 1, H0597: 1, | | |
| | | | | | | | H0150: 1, L0471: 1, | | |
| | | | | | | | H0011: 1, S0362: 1, | | |
| | | | | | | | H0373: 1, S0388: 1, | | |
| | | | | | | | H0354: 1, H0099: 1, | | |
| | | | | | | | H0594: 1, H0266: 1, | | |
| | | | | | | | H0416: 1, H0188: 1, | | |
| | | | | | | | S0318: 1, S0334: 1, | | |
| | | | | | | | H0687: 1, S0338: 1, | | |
| | | | | | | | H0252: 1, H0213: 1, | | |
| | | | | | | | H0553: 1, H0111: 1, | | |
| | | | | | | | H0617: 1, H0169: 1, | | |
| | | | | | | | H0163: 1, T0067: 1, | | |
| | | | | | | | L0435: 1, L0564: 1, | | |
| | | | | | | | S0440: 1, H0509: 1, | | |
| | | | | | | | S0150: 1, H0646: 1, | | |
| | | | | | | | H0652: 1, L3815: 1, | | |
| | | | | | | | L0371: 1, L0769: 1, | | |
| | | | | | | | L0771: 1, L0649: 1, | | |
| | | | | | | | L0774: 1, L0375: 1, | | |
| | | | | | | | L0651: 1, L0378: 1, | | |
| | | | | | | | L0805: 1, L0606: 1, | | |
| | | | | | | | L0657: 1, L0384: 1, | | |
| | | | | | | | L0529: 1, L5623: 1, | | |
| | | | | | | | L0793: 1, L0664: 1, | | |
| | | | | | | | S0216: 1, H0144: 1, | | |
| | | | | | | | H0723: 1, H0593: 1, | | |
| | | | | | | | H0689: 1, H0659: 1, | | |
| | | | | | | | H0672: 1, S0328: 1, | | |
| | | | | | | | H0539: 1, H0518: 1, | | |
| | | | | | | | H0521: 1, H0696: 1, | | |
| | | | | | | | H0134: 1, L0612: 1, | | |
| | | | | | | | H0732: 1, S3012: 1, | | |
| | | | | | | | S0390: 1, S0037: 1, | | |
| | | | | | | | S3014: 1, S0032: 1, | | |
| | | | | | | | L0743: 1, L0749: 1, | | |
| | | | | | | | L0752: 1, L0755: 1, | | |
| | | | | | | | H0707: 1, L0591: 1, | | |
| | | | | | | | L0592: 1, H0653: 1, | | |
| | | | | | | | H0136: 1, S0412: 1 and | | |
| | | | | | | | H0721: 1. | | |
| | HPWTF23 | 843700 | 112 | 283-675 | 219 | Val-80 to Leu-92, | | | |
| | | | | | | Ser-98 to Lys-104, | | | |
| | | | | | | Pro-111 to Pro-122. | | | |
| 95 | HGCAC19 | 851527 | 105 | 317-346 | 212 | | L0794: 15, L0803: 12, | | |
| | | | | | | | L0766: 7, H0013: 6, | | |
| | | | | | | | H0090: 6, L0663: 6, | | |
| | | | | | | | L0777: 6, L0731: 6, | | |
| | | | | | | | L0759: 6, H0457: 5, | | |
| | | | | | | | H0328: 5, L0493: 5, | | |
| | | | | | | | L0666: 5, L0754: 5, | | |
| | | | | | | | L0749: 5, H0543: 5, | | |
| | | | | | | | H0656: 4, S0358: 4, | | |
| | | | | | | | H0615: 4, L0665: 4, | | |
| | | | | | | | H0521: 4, L0779: 4, | | |
| | | | | | | | L0588: 4, H0305: 3, | | |
| | | | | | | | S0360: 3, H0036: 3, | | |
| | | | | | | | H0052: 3, T0042: 3, | | |
| | | | | | | | L0761: 3, L0805: 3, | | |
| | | | | | | | L0809: 3, H0144: 3, | | |
| | | | | | | | H0670: 3, H0696: 3, | | |
| | | | | | | | L0591: 3, S0134: 2, | | |
| | | | | | | | H0657: 2, L3659: 2, | | |
| | | | | | | | S0418: 2, S0442: 2, | | |
| | | | | | | | S0007: 2, S0045: 2, | | |
| | | | | | | | L0717: 2, H0600: 2, | | |
| | | | | | | | H0486: 2, H0156: 2, | | |
| | | | | | | | H0575: 2, H0590: 2, | | |
| | | | | | | | H0024: 2, S0022: 2, | | |
| | | | | | | | L0483: 2, H0135: 2, | | |
| | | | | | | | H0038: 2, H0560: 2, | | |
| | | | | | | | S0422: 2, L0457: 2, | | |
| | | | | | | | H0529: 2, L0625: 2, | | |
| | | | | | | | L0648: 2, L0776: 2, | | |
| | | | | | | | L0655: 2, L0527: 2, | | |
| | | | | | | | S0374: 2, H0520: 2, | | |
| | | | | | | | H0519: 2, H0659: 2, | | |
| | | | | | | | H0436: 2, L0748: 2, | | |
| | | | | | | | L0745: 2, L0581: 2, | | |
| | | | | | | | L0361: 2, H0542: 2, | | |
| | | | | | | | H0423: 2, S0424: 2, | | |
| | | | | | | | H0624: 1, H0171: 1, | | |
| | | | | | | | H0556: 1, T0002: 1, | | |
| | | | | | | | H0686: 1, S0342: 1, | | |
| | | | | | | | H0717: 1, T0049: 1, | | |
| | | | | | | | S0430: 1, H0650: 1, | | |
| | | | | | | | H0341: 1, H0663: 1, | | |
| | | | | | | | H0589: 1, S0356: 1, | | |
| | | | | | | | S0376: 1, S0408: 1, | | |
| | | | | | | | S0410: 1, L2336: 1, | | |
| | | | | | | | H0329: 1, S0046: 1, | | |
| | | | | | | | H0645: 1, H0369: 1, | | |
| | | | | | | | S6014: 1, H0370: 1, | | |
| | | | | | | | H0455: 1, H0438: 1, | | |
| | | | | | | | H0602: 1, H0586: 1, | | |
| | | | | | | | H0587: 1, H0574: 1, | | |
| | | | | | | | H0559: 1, S0280: 1, | | |
| | | | | | | | L0021: 1, H0318: 1, | | |
| | | | | | | | S0474: 1, H0263: 1, | | |
| | | | | | | | T0115: 1, H0545: 1, | | |
| | | | | | | | L0157: 1, H0123: 1, | | |
| | | | | | | | L0471: 1, H0015: 1, | | |
| | | | | | | | S0388: 1, S0051: 1, | | |
| | | | | | | | H0375: 1, H0271: 1, | | |
| | | | | | | | H0188: 1, S0312: 1, | | |
| | | | | | | | S0003: 1, H0688: 1, | | |
| | | | | | | | H0039: 1, H0622: 1, | | |
| | | | | | | | H0031: 1, H0644: 1, | | |
| | | | | | | | L0055: 1, H0169: 1, | | |
| | | | | | | | L0456: 1, H0163: 1, | | |
| | | | | | | | H0634: 1, H0551: 1, | | |
| | | | | | | | H0379: 1, H0488: 1, | | |
| | | | | | | | H0279: 1, L0475: 1, | | |
| | | | | | | | S0352: 1, H0652: 1, | | |
| | | | | | | | S0208: 1, L0640: 1, | | |
| | | | | | | | L0763: 1, L0500: 1, | | |
| | | | | | | | L0769: 1, L0646: 1, | | |
| | | | | | | | L0662: 1, L0649: 1, | | |
| | | | | | | | L0498: 1, L0804: 1, | | |
| | | | | | | | L0650: 1, L0784: 1, | | |
| | | | | | | | L0806: 1, L0653: 1, | | |
| | | | | | | | L0606: 1, L0515: 1, | | |
| | | | | | | | L0659: 1, L0526: 1, | | |
| | | | | | | | L0519: 1, L0788: 1, | | |
| | | | | | | | L0790: 1, L0791: 1, | | |
| | | | | | | | L0664: 1, S0053: 1, | | |
| | | | | | | | S0296: 1, H0547: 1, | | |
| | | | | | | | S0126: 1, H0682: 1, | | |
| | | | | | | | H0684: 1, H0658: 1, | | |
| | | | | | | | H0660: 1, H0672: 1, | | |
| | | | | | | | S0380: 1, H0518: 1, | | |
| | | | | | | | H0525: 1, S0044: 1, | | |
| | | | | | | | S0404: 1, S0406: 1, | | |
| | | | | | | | H0479: 1, S0432: 1, | | |
| | | | | | | | S3014: 1, L0744: 1, | | |
| | | | | | | | L0750: 1, L0780: 1, | | |
| | | | | | | | L0753: 1, L0604: 1, | | |
| | | | | | | | S0106: 1, S0242: 1, | | |
| | | | | | | | S0196: 1, S0452: 1 and | | |
| | | | | | | | H0506: 1. | | |
| | HGCAC19 | 842540 | 113 | 315-344 | 220 | | | | |
| | HGCAC19 | 801999 | 114 | 317-346 | 221 | | | | |
| 96 | HEQBJ01 | 876546 | 106 | 2603-2662 | 213 | | S0360: 3, H0619: 3, | 16 | |
| | | | | | | | H0673: 2, L0438: 2, | | |
| | | | | | | | H0685: 1, S0444: 1, | | |
| | | | | | | | H0544: 1, H0266: 1, | | |
| | | | | | | | H0163: 1, L0770: 1, | | |
| | | | | | | | L0646: 1, L0768: 1, | | |
| | | | | | | | L0766: 1, L0803: 1, | | |
| | | | | | | | L0776: 1, S0152: 1, | | |
| | | | | | | | S0027: 1, L0439: 1, | | |
| | | | | | | | L0747: 1, L0777: 1, | | |
| | | | | | | | L0752: 1 and L0758: 1. | | |
| | HEQBJ01 | 861786 | 115 | 2603-2662 | 222 | | | | |
| | HEQBJ01 | 834633 | 116 | 505-564 | 223 | | | | |
| 97 | HBJHT01 | 587262 | 107 | 200-265 | 214 | | L0667: 2, S0114: 1, | | |
| | | | | | | | H0351: 1, H0318: 1, | | |
| | | | | | | | H0615: 1 and L0764: 1. | | |
| | HBJHT01 | 580026 | 117 | 193-336 | 224 | | | | |
| 98 | HAGDW20 | 637489 | 108 | 238-291 | 215 | | S0010: 1 and H0616: 1. | | |
| 99 | HTLIF11 | 843506 | 109 | 933-1049 | 216 | Pro-4 to Gly-9. | H0253: 7, H0618: 4, | | |
| | | | | | | | H0620: 3, L0794: 3, | | |
| | | | | | | | L0769: 2, L0768: 2, | | |
| | | | | | | | L0439: 2, H0327: 1, | | |
| | | | | | | | H0051: 1, S0250: 1, | | |
| | | | | | | | S0036: 1, L0639: 1, | | |
| | | | | | | | L0761: 1, L0635: 1, | | |
| | | | | | | | L0791: 1, L0664: 1, | | |
| | | | | | | | L0438: 1, H0539: 1, | | |
| | | | | | | | L0741: 1, L0747: 1, | | |
| | | | | | | | L0750: 1, L0756: 1 and | | |
| | | | | | | | L0753: 1. | | |

[0092] TABLE 1B.2

| | | | SEQ | |
|---|---|---|---|---|
| Gene | cDNA | | ID | |
| No: | Clone ID | Contig ID: | NO: X | Tissue Distribution Library Code: Count (see Table 4 for Library Codes) |
| 1 | HACBT91 | 789939 | 11 | AR283: 41, AR219: 39, AR277: 38, AR218: 33, AR055: 29, AR316: 28, AR039: 25, AR104: 22, AR299: 22, AR096: 20, AR089: 20, |
| | | | | AR185: 19, AR240: 19, AR282: 18, AR060: 17, AR300: 16, AR313: 16, L0665: 5, L0743: 3, H0341: 2, L0761: 2, L0756: 2, |
| | | | | S0356: 1, H0734: 1, S0280: 1, T0048: 1, H0271: 1, S0440: 1, H0641: 1, H0646: 1, L0770: 1, L0637: 1, L0800: 1, L0773: 1, L0648: 1, |
| | | | | L0662: 1, L0768: 1, L0766: 1, L0649: 1, L0375: 1, L0784: 1, L0806: 1, L0655: 1, L0809: 1, H0672: 1, S0406: 1, L0747: 1, L0749: 1 and L0750: 1. |
| 2 | HADDE71 | 839187 | 12 | AR283: 48, AR277: 39, AR313: 33, AR219: 30, AR316: 27, AR282: 27, AR089: 27, AR299: 26, AR218: 26, AR240: 25, AR185: 22, |
| | | | | AR104: 22, AR055: 22, AR096: 22, AR300: 20, AR039: 20, AR060: 15, L0769: 11, L0747: 9, L0809: 6, S0408: 4, L0770: 4, |
| | | | | L0439: 4, L0752: 4, L0759: 4, L0766: 3, L0803: 3, L0666: 3, L0751: 3, L0780: 3, S0007: 2, H0619: 2, H0351: 2, H0333: 2, H0427: 2, |
| | | | | H0052: 2, L0761: 2, L0662: 2, L0794: 2, L0774: 2, L0806: 2, L0659: 2, H0547: 2, H0521: 2, L0741: 2, L0745: 2, L0750: 2, L0779: 2, |
| | | | | L0777: 2, H0543: 2, H0739: 1, H0171: 1, L3019: 1, H0483: 1, H0254: 1, H0125: 1, H0675: 1, H0580: 1, H0722: 1, H0733: 1, |
| | | | | S0140: 1, H0261: 1, H0592: 1, H0586: 1, H0587: 1, H0257: 1, H0486: 1, L0022: 1, H0042: 1, H0581: 1, H0150: 1, H0086: 1, |
| | | | | H0123: 1, T0010: 1, H0266: 1, H0673: 1, S0364: 1, H0087: 1, H0264: 1, H0494: 1, H0560: 1, H0538: 1, L0762: 1, L0772: 1, L0646: 1, |
| | | | | L0765: 1, L0649: 1, L0805: 1, L0776: 1, L0657: 1, L0783: 1, L5622: 1, L0791: 1, L2654: 1, S0126: 1, H0435: 1, S0330: 1, H0522: 1, L0743: 1, L0744: 1, L0749: 1, |
| | | | | L0786: 1, L0753: 1, L0755: 1, L0731: 1, L0758: 1, S0436: 1, S0011: 1 and S0192: 1. |
| 3 | HADDJ13 | 827273 | 13 | H0427: 1 |
| 4 | HADMA77 | 783049 | 14 | AR104: 16, AR039: 10, AR277: 9, AR089: 9, AR240: 9, AR055: 9, AR300: 8, AR218: 7, AR299: 7, AR283: 7, AR060: 7, AR282: 7, |
| | | | | AR316: 6, AR219: 6, AR096: 5, AR185: 5, AR313: 4, L0439: 15, S0222: 4, L0157: 4, L0769: 4, L0438: 3, L0745: 3, L0731: 3, |
| | | | | L0758: 3, L0599: 3, H0443: 2, H0441: 2, S0010: 2, L0662: 2, L0744: 2, L0748: 2, L0750: 2, L0756: 2, L0777: 2, H0583: 1, L0005: 1, |
| | | | | S0354: 1, H0675: 1, S0408: 1, H0619: 1, H0369: 1, H0574: 1, H0486: 1, H0390: 1, S0346: 1, H0309: 1, H0597: 1, T0003: 1, H0024: 1, |
| | | | | S6028: 1, H0028: 1, T0006: 1, H0628: 1, H0135: 1, H0551: 1, S0438: 1, L0520: 1, L0768: 1, L0776: 1, L0559: 1, L0659: 1, L0384: 1, |
| | | | | L0809: 1, H0144: 1, H0547: 1, L0746: 1, L0747: 1, L0757: 1 and S0434: 1. |
| 5 | HADMB15 | 847116 | 15 | AR104: 19, AR218: 19, AR219: 16, AR089: 11, AR313: 8, AR055: 8, AR060: 7, AR299: 6, AR282: 5, AR300: 5, AR039: 5, |
| | | | | AR240: 5, AR316: 5, AR185: 5, AR277: 4, AR283: 4, AR096: 3, L0595: 2, L0442: 1, L0005: 1, L3653: 1, H0390: 1, H0081: 1, |
| | | | | H0024: 1, L0770: 1, L5566: 1, L0651: 1, L0565: 1, L0439: 1, L0747: 1, L0752: 1, H0445: 1, L0592: 1 and L0599: 1. |
| 6 | HAGBQ12 | 722205 | 16 | AR060: 7, AR055: 6, AR104: 5, AR185: 5, AR089: 4, AR299: 4, AR277: 4, AR300: 4, AR283: 4, AR313: 3, AR316: 3, AR240: 3, |
| | | | | AR039: 3, AR096: 3, AR282: 2, AR218: 2, AR219: 1, L0754: 4, L0805: 2, L0777: 2, L0755: 2, S0010: 1, H0049: 1, L0163: 1, |
| | | | | L0771: 1, L0775: 1 and L0776: 1. |
| 7 | HAGCC87 | 638587 | 17 | AR313: 17, AR039: 14, AR277: 10, AR104: 10, AR089: 9, AR300: 9, AR096: 9, AR299: 8, AR185: 7, AR055: 6, AR060: 6, |
| | | | | AR218: 6, AR240: 6, AR316: 6, AR282: 4, AR283: 4, AR219: 3, L0439: 4, L0519: 3, S0010: 2, T0010: 1, L0809: 1, H0682: 1, |
| | | | | S0404: 1, S0406: 1, H0436: 1 and L0756: 1. |
| 8 | HAGHN57 | 773286 | 18 | AR313: 12, AR316: 11, AR218: 11, AR185: 11, AR039: 10, AR219: 10, AR299: 10, AR060: 9, AR055: 8, AR277: 8, AR282: 8, |
| | | | | AR096: 7, AR089: 7, AR300: 7, AR240: 6, AR104: 6, AR283: 4, H0521: 5, L0777: 5, S0376: 4, H0733: 3, H0156: 3, H0519: 3, |
| | | | | H0436: 3, L0731: 3, H0656: 2, H0580: 2, H0747: 2, L3816: 2, H0036: 2, L0471: 2, H0090: 2, H0040: 2, H0551: 2, H0494: 2, |
| | | | | S0438: 2, S0440: 2, H0529: 2, L0809: 2, H0144: 2, S0374: 2, H0593: 2, H0170: 1, L3643: 1, H0583: 1, H0650: 1, S0418: 1, S0358: 1, |
| | | | | S0444: 1, L3645: 1, H0741: 1, H0734: 1, S0045: 1, S0476: 1, H0619: 1, H0586: 1, H0643: 1, H0632: 1, H0486: 1, S0280: 1, H0590: 1, |
| | | | | S0010: 1, S0346: 1, H0581: 1, H0231: 1, H0046: 1, H0123: 1, S6028: 1, H0687: 1, S0003: 1, S0214: 1, H0252: 1, H0615: 1, H0212: 1, |
| | | | | L0455: 1, S0366: 1, H0163: 1, H0038: 1, H0634: 1, T0067: 1, L0475: 1, H0560: 1, H0561: 1, S0464: 1, H0646: 1, S0426: 1, H0026: 1, |
| | | | | L0790: 1, H0520: 1, H0435: 1, S0328: 1, H0539: 1, H0704: 1, S0027: 1, L0439: 1, L0750: 1, L0756: 1, L0757: 1, S0434: 1, L0581: 1, |
| | | | | L0595: 1, H0543: 1 and H0423: 1. |
| 9 | HAGHR18 | 655435 | 19 | AR052: 6, AR055: 6, AR247: 6, AR061: 6, AR053: 6, AR060: 5, AR182: 5, AR263: 5, AR310: 5, AR312: 4, AR251: 4, AR033: 4, |
| | | | | AR244: 4, AR293: 4, AR282: 4, AR269: 3, AR185: 3, AR270: 3, AR298: 3, AR089: 3, AR253: 3, AR296: 3, AR104: 3, AR232: 3, |
| | | | | AR299: 3, AR285: 3, AR198: 3, AR286: 3, AR184: 3, AR237: 3, AR277: 3, AR295: 3, AR300: 3, AR213: 3, AR284: 2, AR283: 2, |
| | | | | AR267: 2, AR266: 2, AR290: 2, AR268: 2, AR289: 2, AR313: 2, AR316: 2, AR294: 2, AR186: 2, AR096: 2, AR183: 2, AR233: 2, |
| | | | | AR240: 2, AR229: 2, AR218: 2, AR177: 2, AR259: 2, AR246: 2, AR248: 2, AR175: 2, AR292: 2, AR309: 2, AR265: 2, AR226: 1, |
| | | | | AR039: 1, AR234: 1, AR179: 1, AR258: 1, AR219: 1, AR231: 1, AR238: 1, L0717: 1 and S0346: 1. |
| 10 | HAQAI92 | 688037 | 20 | AR218: 541, AR219: 408, AR240: 96, AR185: 95, AR055: 69, AR039: 68, AR096: 62, AR316: 50, AR089: 42, AR299: 41, |
| | | | | AR300: 37, AR060: 31, AR104: 29, AR313: 26, AR283: 23, AR282: 19, AR277: 13, H0617: 5, H0606: 2, L0744: 2, L0779: 2, |
| | | | | H0295: 1, H0100: 1, S0440: 1, H0026: 1, L0762: 1, L0504: 1, L0769: 1, L0764: 1, L0662: 1, L0649: 1, L0804: 1, L0787: 1, L0666: 1, |
| | | | | L0663: 1, H0520: 1, L0748: 1, L0751: 1, L0752: 1 and S0436: 1. |
| 11 | HAQBG57 | 837545 | 21 | H0295: 6, H0255: 2, H0392: 1, H0587: 1, H0333: 1, H0545: 1, H0328: 1, H0616: 1, S0142: 1, H0529: 1, L0659: 1, L0783: 1, L0528: 1, H0547: 1, |
| | | | | S0136: 1, S0390: 1, L0754: 1, L0747: 1 and L0752: 1. |
| 12 | HAQCE11 | 633730 | 22 | AR185: 11, AR060: 7, AR055: 6, AR218: 6, AR300: 5, AR104: 4, AR299: 4, AR240: 4, AR277: 3, AR089: 3, AR283: 3, AR096: 3, |
| | | | | AR316: 3, AR313: 2, AR039: 2, AR282: 2, AR219: 2, H0295: 5 and L0438: 1. |
| 13 | HBAGD86 | 838799 | 23 | AR219: 7, AR218: 4, AR313: 4, AR104: 4, AR039: 3, AR299: 3, AR282: 2, AR300: 2, AR096: 2, AR316: 2, AR277: 1, AR240: 1, |
| | | | | AR089: 1, L0809: 4, L0766: 3, L0439: 3, H0624: 2, H0411: 2, L0794: 2, L0749: 2, L0756: 2, L0005: 1, L3649: 1, S0476: 1, H0599: 1, |
| | | | | L0471: 1, S0051: 1, T0010: 1, H0266: 1, S0150: 1, S0422: 1, L0637: 1, L0765: 1, L0803: 1, L0783: 1, L5622: 1, H0144: 1, H0672: 1, |
| | | | | S0392: 1, L0748: 1, L0754: 1, L0779: 1, L0777: 1, L0731: 1 and L0759: 1. |
| 14 | HBGBC29 | 691473 | 24 | AR299: 5, AR218: 5, AR313: 4, AR300: 4, AR055: 4, AR060: 4, AR277: 3, AR316: 3, AR089: 3, AR185: 3, AR096: 3, AR039: 3, |
| | | | | AR219: 3, AR104: 3, AR240: 3, AR282: 2, AR283: 2, L0731: 20, L0747: 7, L0794: 6, L0764: 4, L0803: 4, L0759: 4, L0662: 3, |
| | | | | L0774: 3, L0749: 3, L0756: 3, S0436: 3, S0360: 2, H0156: 2, H0046: 2, H0181: 2, L0766: 2, L0659: 2, L0809: 2, L0438: 2, S0126: 2, |
| | | | | H0658: 2, L0439: 2, L0754: 2, L0777: 2, L0755: 2, L0757: 2, L0604: 2, S0242: 2, S0442: 1, S0376: 1, S0408: 1, L0717: 1, H0270: 1, |
| | | | | H0263: 1, H0597: 1, H0123: 1, H0617: 1, H0551: 1, S0440: 1, H0647: 1, L0770: 1, L0769: 1, L0638: 1, L0775: 1, L0651: 1, L0527: 1, |
| | | | | L0526: 1, L0789: 1, L0666: 1, L0665: 1, H0547: 1, H0435: 1, H0648: 1, S0330: 1, S0406: 1, H0627: 1, L0750: 1, L0780: 1, L0752: 1, |
| | | | | L0758: 1, L0366: 1 and H0293: 1. |
| 15 | HBJAB02 | 837309 | 25 | AR282: 3, AR277: 1, AR039: 1, AR316: 1, S0434: 5, L0794: 3, H0255: 2, H0318: 2, H0251: 2, L0764: 2, L0628: 2, L0809: 2, |
| | | | | L0665: 2, H0658: 2, S0406: 2, L0361: 2, H0265: 1, H0685: 1, H0657: 1, H0483: 1, S0420: 1, S0442: 1, S0358: 1, H0729: 1, H0734: 1, |
| | | | | S0132: 1, S0222: 1, T0082: 1, H0150: 1, H0083: 1, S0214: 1, H0252: 1, H0628: 1, T0041: 1, S0344: 1, H0529: 1, L0520: 1, L0535: 1, |
| | | | | L0662: 1, L0387: 1, L0375: 1, L0518: 1, L0666: 1, L0663: 1, H0726: 1, H0519: 1, H0670: 1, H0660: 1, L0602: 1, L0747: 1, L0777: 1, |
| | | | | L0601: 1, S0276: 1, H0423: 1 and H0422: 1. |
| 16 | HBMUH74 | 866160 | 26 | AR218: 12, AR055: 8, AR060: 7, AR104: 7, AR219: 5, AR240: 5, AR299: 5, AR096: 4, AR316: 4, AR300: 4, AR039: 4, AR089: 3, |
| | | | | AR283: 3, AR185: 3, AR313: 3, AR282: 2, AR277: 2, L0754: 3, L0777: 3, L0439: 2, S0116: 1, H0341: 1, H0661: 1, H0038: 1, |
| | | | | H0412: 1, L0761: 1, L0667: 1, L0764: 1, L0788: 1, H0435: 1, L0749: 1, L0779: 1 and L0758: 1. |
| 17 | HBNAX40 | 834801 | 27 | AR218: 8, AR313: 8, AR055: 6, AR060: 6, AR089: 5, AR104: 5, AR185: 4, AR300: 4, AR299: 4, AR316: 4, AR096: 3, AR277: 3, |
| | | | | AR240: 3, AR039: 3, AR283: 3, AR282: 3, AR219: 2, L0439: 11, H0171: 5, L0754: 5, L0748: 4, H0052: 3, L0662: 3, L0756: 3, |
| | | | | L0755: 3, H0422: 3, S0360: 2, L0738: 2, H0032: 2, L0803: 2, L0655: 2, L0789: 2, L0605: 2, H0423: 2, H0638: 1, T0114: 1, H0156: 1, |
| | | | | L0021: 1, S0010: 1, H0581: 1, H0046: 1, L0471: 1, H0014: 1, H0356: 1, H0188: 1, H0553: 1, H0591: 1, S0386: 1, T0042: 1, H0625: 1, |
| | | | | H0641: 1, S0142: 1, L0598: 1, L0369: 1, L0640: 1, L0375: 1, L0654: 1, L0659: 1, L0783: 1, L0663: 1, L0665: 1, H0144: 1, L0352: 1, |
| | | | | H0547: 1, H0648: 1, H0672: 1, H0555: 1, H0436: 1, L0749: 1, L0779: 1, L0731: 1, L0758: 1, L0759: 1, H0445: 1, L0366: 1 and |
| | | | | H0668: 1. |
| 18 | HBXCX15 | 637542 | 28 | S0038: 3, H0438: 1, L0363: 1 and S0053: 1. |
| 19 | HCDBO32 | 831942 | 29 | AR219: 9, AR185: 8, AR055: 8, AR218: 8, AR089: 6, AR313: 6, AR283: 6, AR282: 6, AR104: 5, AR060: 5, AR316: 5, AR300: 5, |
| | | | | AR299: 4, AR096: 4, AR240: 4, AR277: 4, AR039: 3, L0803: 7, L0766: 4, L0777: 4, L0666: 3, H0521: 3, T0115: 2, H0687: 2, |
| | | | | L0809: 2, H0659: 2, L0754: 2, L0779: 2, L0759: 2, L3643: 1, H0341: 1, H0747: 1, H0749: 1, L3387: 1, H0351: 1, S0222: 1, H0441: 1, |
| | | | | L3816: 1, H0013: 1, S0280: 1, H0251: 1, H0544: 1, H0123: 1, H0354: 1, H0266: 1, H0622: 1, H0090: 1, T0041: 1, H0641: 1, S0422: 1, |
| | | | | L0371: 1, L0646: 1, L0662: 1, L0774: 1, L0805: 1, L0653: 1, L0659: 1, L0635: 1, L0526: 1, L0783: 1, L0663: 1, L0664: 1, L0665: 1, |
| | | | | H0144: 1, T0068: 1, L3811: 1, H0519: 1, H0682: 1, S0152: 1, S0136: 1, L0744: 1, L0780: 1, L0758: 1, H0444: 1, H0445: 1, L0590: 1, |
| | | | | L0594: 1, S0026: 1 and H0422: 1. |
| 20 | HCEEE79 | 560609 | 30 | H0052: 1 |
| 21 | HCEFZ82 | 831745 | 31 | L0748: 11, H0052: 8, L0803: 8, L0749: 8, L0770: 7, L0439: 5, L0746: 4, L0752: 4, L3811: 3, H0575: 2, H0012: 2, H0031: 2, |
| | | | | L0768: 2, L0804: 2, L0774: 2, L0740: 2, L0747: 2, L0756: 2, L0779: 2, L0757: 2, L0758: 2, L0592: 2, L0593: 2, H0556: 1, S0420: 1, |
| | | | | S0376: 1, H0441: 1, H0632: 1, S0010: 1, T0115: 1, H0545: 1, H0009: 1, H0620: 1, H0197: 1, H0051: 1, S0388: 1, S0051: 1, H0252: 1, |
| | | | | H0032: 1, L0455: 1, H0591: 1, H0272: 1, L0564: 1, S0438: 1, S0344: 1, L0373: 1, L0646: 1, L0794: 1, L0766: 1, L0805: 1, L0776: 1, |
| | | | | L0783: 1, L0809: 1, S0374: 1, H0522: 1, H0134: 1, L0780: 1, L0731: 1, L0759: 1, S0436: 1, L0597: 1, H0543: 1, H0423: 1 and L0600: 1. |
| 22 | HCUCF89 | 637986 | 32 | AR313: 26, AR039: 18, AR277: 13, AR299: 12, AR096: 11, AR089: 11, AR185: 11, AR300: 10, AR240: 8, AR316: 8, AR218: 5, |
| | | | | AR282: 4, AR104: 4, AR060: 4, AR219: 3, AR055: 2, H0306: 1, L0761: 1 and H0436: 1. |
| 23 | HCWAE64 | 535893 | 33 | AR277: 7, AR282: 1, H0305: 1 |
| 24 | HCWUL09 | 834722 | 34 | AR277: 1, H0305: 9, H0589: 2 and S0001: 1. |
| 25 | HDPDI72 | 897277 | 35 | AR263: 7, AR039: 6, AR089: 5, AR184: 5, AR096: 4, AR313: 4, AR299: 4, AR282: 3, AR277: 3, AR240: 3, AR060: 3, AR218: 3, |
| | | | | AR249: 3, AR316: 3, AR185: 2, AR055: 2, AR274: 2, AR104: 2, AR267: 2, AR247: 2, AR300: 2, AR206: 1, AR283: 1, AR052: 1, |
| | | | | AR312: 1, AR275: 1, AR183: 1, AR270: 1, AR309: 1, AR238: 1, H0521: 2 and H0580: 1. |
| 26 | HDPFY18 | 779450 | 36 | AR313: 9, AR039: 6, AR299: 4, AR300: 4, AR096: 3, AR185: 3, AR089: 3, AR316: 2, AR277: 2, AR240: 1, AR218: 1, AR060: 1 |
| | | | | S0114: 1, H0427: 1, H0123: 1, H0688: 1, H0264: 1, L0547: 1, L0518: 1, L3811: 1, H0521: 1, H0445: 1 and H0543: 1. |
| 27 | HDPIE44 | 899328 | 37 | AR263: 6, AR265: 3, AR184: 3, AR183: 3, AR096: 3, AR313: 3, AR269: 3, AR039: 3, AR104: 2, AR312: 2, AR270: 2, AR268: 2, |
| | | | | AR298: 2, AR296: 2, AR292: 2, AR060: 2, AR052: 2, AR282: 2, AR291: 2, AR198: 2, AR316: 2, AR192: 2, AR299: 2, AR286: 2, |
| | | | | AR267: 2, AR218: 2, AR055: 2, AR295: 2, AR290: 2, AR283: 2, AR089: 2, AR289: 1, AR231: 1, AR213: 1, AR247: 1, AR284: 1, |
| | | | | AR293: 1, AR053: 1, AR033: 1, AR238: 1, AR258: 1, AR182: 1, AR177: 1, AR277: 1, AR185: 1, AR310: 1, L3811: 7, L0439: 7, |
| | | | | L0759: 5, L0591: 5, L0803: 4, H0547: 4, L0748: 4, L0755: 4, L0596: 4, H0171: 3, S0376: 3, S0007: 3, H0024: 3, H0355: 3, H0615: 3, |
| | | | | H0428: 3, H0090: 3, H0623: 3, S0422: 3, L0794: 3, L0766: 3, L0659: 3, H0144: 3, H0658: 3, S0406: 3, L0749: 3, L0758: 3, S0436: 3, |
| | | | | H0624: 2, H0717: 2, S0358: 2, S0360: 2, H0486: 2, H0427: 2, S0010: 2, H0052: 2, H0251: 2, H0687: 2, H0622: 2, H0553: 2, |
| | | | | H0644: 2, H0591: 2, S0438: 2, L0769: 2, L0662: 2, L0805: 2, S0374: 2, S0126: 2, H0689: 2, H0670: 2, H0521: 2, S0028: 2, L0744: 2, |
| | | | | L0740: 2, L0754: 2, L0752: 2, L0593: 2, S0192: 2, H0506: 2, H0265: 1, H0294: 1, H0656: 1, S0212: 1, L0481: 1, S0418: 1, L0005: 1, |
| | | | | S0356: 1, S0442: 1, S0408: 1, H0733: 1, H0208: 1, S0045: 1, H0619: 1, L0717: 1, S0222: 1, H0455: 1, L3653: 1, H0013: 1, H0599: 1, |
| | | | | S0474: 1, H0196: 1, H0263: 1, H0046: 1, H0172: 1, H0050: 1, L0471: 1, H0012: 1, H0620: 1, H0014: 1, H0051: 1, H0356: 1, |
| | | | | H0375: 1, S0316: 1, H0328: 1, H0688: 1, L0483: 1, S0364: 1, S0366: 1, H0135: 1, H0163: 1, H0038: 1, H0040: 1, H0634: 1, H0551: 1, |
| | | | | H0488: 1, T0042: 1, H0494: 1, S0016: 1, H0625: 1, H0561: 1, S0440: 1, L2270: 1, S0344: 1, L3818: 1, H0538: 1, L0598: 1, L0770: 1, |
| | | | | L0638: 1, L0641: 1, L0626: 1, L0804: 1, L0375: 1, L0784: 1, L0523: 1, L0806: 1, L0776: 1, L0526: 1, L0809: 1, L5622: 1, L0789: 1, |
| | | | | L0793: 1, L4559: 1, L0663: 1, L4560: 1, L3826: 1, L3828: 1, H0683: 1, H0672: 1, H0651: 1, S0330: 1, H0539: 1, H0555: 1, S0390: 1, |
| | | | | S0206: 1, L0747: 1, L0779: 1, S0308: 1, L0604: 1 and H0423: 1. |
| 28 | HDPIU94 | 813352 | 38 | AR055: 17, AR277: 13, AR060: 12, AR316: 9, AR219: 8, AR240: 8, AR089: 8, AR300: 8, AR218: 8, AR039: 7, AR283: 7, |
| | | | | AR096: 6, AR282: 5, AR104: 5, AR185: 4, AR299: 4, AR313: 2, L0748: 6, L0666: 5, L0665: 5, L0768: 4, L0777: 4, L0595: 4, |
| | | | | H0352: 4, S0045: 3, H0124: 3, L0774: 3, S0028: 3, L0439: 3, L0756: 3, L0592: 3, S0376: 2, S0360: 2, H0619: 2, S0222: 2, L3816: 2, |
| | | | | H0635: 2, H0036: 2, H0052: 2, H0046: 2, L0041: 2, S0312: 2, H0551: 2, L3815: 2, L0764: 2, L0663: 2, H0144: 2, L3825: 2, L0751: 2, |
| | | | | L0754: 2, L0745: 2, L0731: 2, L0589: 2, H0653: 2, H0136: 2, H0216: 2, H0624: 1, S6024: 1, S0430: 1, H0656: 1, H0255: 1, S0046: 1, |
| | | | | H0747: 1, H0645: 1, L2759: 1, H0013: 1, H0156: 1, H0575: 1, H0050: 1, S0050: 1, H0373: 1, H0687: 1, S0314: 1, S0250: 1, H0031: 1, |
| | | | | H0135: 1, H0634: 1, H0616: 1, H0380: 1, H0264: 1, H0433: 1, H0059: 1, L0351: 1, S0422: 1, L0800: 1, L0662: 1, L0626: 1, L0766: 1, |
| | | | | L0803: 1, L0375: 1, L0655: 1, L0659: 1, L0783: 1, L0809: 1, L0664: 1, L2263: 1, L2258: 1, L2259: 1, H0726: 1, L3826: 1, L3827: 1, H0648: 1, S0152: 1, |
| | | | | L3833: 1, H0521: 1, S0390: 1, S3014: 1, S0027: 1, L0749: 1, L0750: 1, L0780: 1, L0758: 1, L0759: 1, S0260: 1 |
| | | | | and L0366: 1. |
| 29 | HDPPD93 | 637588 | 39 | AR202: 68, AR194: 68, AR281: 64, AR244: 59, AR315: 56, AR205: 52, AR246: 50, AR280: 49, AR283: 45, AR314: 39, AR271: 38, |
| | | | | AR232: 37, AR243: 37, AR241: 35, AR316: 34, AR282: 33, AR204: 33, AR263: 32, AR089: 32, AR192: 32, AR265: 31, AR277: 31, |
| | | | | AR206: 30, AR219: 29, AR310: 29, AR033: 29, AR096: 29, AR313: 28, AR299: 28, AR240: 26, AR247: 26, AR273: 24, AR300: 24, |
| | | | | AR198: 24, AR295: 24, AR274: 24, AR218: 24, AR039: 23, AR275: 23, AR055: 23, AR213: 23, AR104: 22, AR251: 22, AR238: 20, |
| | | | | AR177: 20, AR312: 20, AR060: 19, AR226: 19, AR052: 19, AR231: 18, AR053: 18, AR309: 18, AR234: 18, AR227: 18, AR185: 17, |
| | | | | AR292: 17, AR237: 17, AR229: 16, AR258: 16, AR183: 16, AR175: 15, AR294: 14, AR256: 13, AR259: 13, AR233: 13, AR293: 11, |
| | | | | AR186: 11, AR253: 10, AR061: 10, AR266: 10, AR267: 9, AR285: 8, AR248: 8, AR270: 8, AR296: 8, AR284: 7, AR179: 7, |
| | | | | AR289: 7, AR249: 7, AR268: 6, AR269: 6, AR291: 6, AR184: 6, AR298: 5, AR286: 5, AR182: 5, AR290: 4, L0794: 6, L0748: 6, |
| | | | | H0556: 5, L0771: 5, H0052: 4, L0756: 4, L0596: 4, H0265: 3, H0341: 3, H0587: 3, L0662: 3, L0803: 3, L0790: 3, S0152: 3, L0750: 3, |
| | | | | S0114: 2, S0360: 2, H0318: 2, L0471: 2, L0369: 2, L0763: 2, L0770: 2, L0764: 2, L0766: 2, L0774: 2, L0378: 2, L0789: 2, L0666: 2, |
| | | | | L3825: 2, H0547: 2, L0747: 2, L0777: 2, L0581: 2, H0543: 2, H0422: 2, S0218: 1, H0255: 1, S0418: 1, S0354: 1, S0376: 1, S0408: 1, |
| | | | | L3649: 1, S0045: 1, H0747: 1, H0619: 1, L0717: 1, S0222: 1, H0431: 1, H0586: 1, H0013: 1, H0069: 1, S0049: 1, H0009: 1, H0071: 1, |
| | | | | H0083: 1, H0428: 1, T0006: 1, H0424: 1, H0213: 1, H0644: 1, H0628: 1, H0135: 1, H0163: 1, H0616: 1, H0413: 1, H0059: 1, |
| | | | | H0561: 1, S0448: 1, H0647: 1, L3818: 1, S0002: 1, L0769: 1, L0800: 1, L0363: 1, L0767: 1, L0768: 1, L0649: 1, L0804: 1, L0806: 1, |
| | | | | L0657: 1, L0512: 1, L0659: 1, L0384: 1, L0647: 1, L5622: 1, L5623: 1, L0664: 1, L0665: 1, S0374: 1, L3828: 1, S0126: 1, H0711: 1, |
| | | | | H0658: 1, H0666: 1, H0539: 1, H0753: 1, H0521: 1, H0522: 1, S0406: 1, H0555: 1, H0436: 1, L0439: 1, L0749: 1, S0031: 1, L0595: 1, |
| | | | | H0136: 1, H0542: 1, H0423: 1, S0424: 1 and H0352: 1. |
| 30 | HDTLM18 | 836057 | 40 | AR313: 9, AR089: 5, AR299: 5, AR185: 4, AR300: 3, AR060: 3, AR096: 3, AR282: 3, AR039: 2, AR316: 2, AR055: 2, AR104: 2, AR240: 1, AR277: 1, AR283: 1, |
| | | | | H0486: 1 and L0599: 1. |
| 31 | HE6CS65 | 762960 | 41 | AR219: 61, AR277: 59, AR218: 48, AR283: 47, AR282: 43, AR316: 39, AR089: 38, AR313: 36, AR299: 34, AR240: 33, AR104: 29, |
| | | | | AR055: 29, AR096: 29, AR039: 27, AR185: 26, AR300: 22, AR060: 21, L0777: 16, L0748: 12, L0757: 11, L0776: 8, L0439: 7, |
| | | | | H0692: 6, H0046: 6, L0769: 5, L0666: 5, S0242: 5, L0770: 4, L0771: 4, L0438: 4, L0743: 4, L0754: 4, L0749: 4, L0758: 4, S0444: 3, |
| | | | | H0051: 3, L0662: 3, L0766: 3, S0378: 3, L0751: 3, L0747: 3, S0436: 3, S0212: 2, H0637: 2, H0497: 2, H0545: 2, H0050: 2, H0031: 2, |
| | | | | H0090: 2, H0100: 2, L0768: 2, L0561: 2, L0774: 2, L0775: 2, L0657: 2, H0670: 2, S3014: 2, L0744: 2, L0752: 2, L0581: 2, H0624: 1, |
| | | | | H0170: 1, H0713: 1, H0717: 1, S6024: 1, T0049: 1, H0255: 1, S0356: 1, S0442: 1, S0358: 1, S0376: 1, S0360: 1, H0619: 1, L3651: 1, |
| | | | | L0717: 1, S0278: 1, H0391: 1, H0333: 1, H0013: 1, H0053: 1, H0575: 1, S0346: 1, H0052: 1, H0263: 1, H0596: 1, L0738: 1, H0572: 1, |
| | | | | H0510: 1, H0266: 1, H0688: 1, H0039: 1, H0622: 1, H0111: 1, H0181: 1, H0617: 1, H0032: 1, H0169: 1, H0634: 1, H0087: 1, |
| | | | | H0412: 1, S0450: 1, S0440: 1, L0639: 1, L0637: 1, L0372: 1, L0646: 1, L0651: 1, L0806: 1, L0659: 1, L0792: 1, L0664: 1, L0665: 1, |
| | | | | S0216: 1, H0144: 1, H0697: 1, S0374: 1, L3812: 1, H0520: 1, H0547: 1, H0658: 1, H0660: 1, H0648: 1, H0521: 1, H0696: 1, S0027: 1, |
| | | | | S0028: 1, L0741: 1, L0740: 1, L0779: 1, L0731: 1, L0759: 1, S0260: 1, H0445: 1, S0434: 1, L0362: 1 and L0366: 1. |
| 32 | HE8BQ49 | 589443 | 42 | H0013: 2 |
| 33 | HE9CY05 | 834826 | 43 | AR039: 1, AR277: 1, AR300: 1, AR282: 1, L0748: 8, L0749: 3, L0471: 2 and H0144: 1. |
| 34 | HEAAW94 | 847340 | 44 | AR282: 3, AR218: 3, AR299: 2, AR039: 2, AR277: 2, AR096: 1, AR316: 1, AR055: 1, AR300: 1, L0439: 26, L0438: 20, L0748: 17, |
| | | | | L0766: 16, L0754: 16, L0731: 16, H0556: 9, L0740: 8, S0222: 7, H0090: 7, L0774: 7, H0144: 6, L0745: 6, L0779: 6, L0777: 6, |
| | | | | L0758: 6, S0003: 5, L0662: 5, L0794: 5, S0418: 4, H0575: 4, L0776: 4, L0751: 4, L0749: 4, L0756: 4, L0780: 4, L0752: 4, L0591: 4, |
| | | | | H0423: 4, H0341: 3, S0360: 3, H0369: 3, H0156: 3, L0435: 3, L0769: 3, L0775: 3, L0809: 3, L0666: 3, H0547: 3, S0328: 3, H0521: 3, |
| | | | | L0747: 3, L0750: 3, H0543: 3, H0171: 2, S0442: 2, S0354: 2, S0358: 2, S0132: 2, S0278: 2, H0497: 2, T0039: 2, H0706: 2, H0036: 2, |
| | | | | S0474: 2, H0596: 2, H0009: 2, H0375: 2, S6028: 2, H0266: 2, S0214: 2, H0328: 2, H0622: 2, H0644: 2, H0591: 2, H0413: 2, T0041: 2, |
| | | | | L0770: 2, L0796: 2, L0363: 2, L0806: 2, L0659: 2, L0542: 2, L0783: 2, L0791: 2, L0665: 2, L3811: 2, H0518: 2, S3014: 2, S0028: 2, |
| | | | | H0595: 2, S0434: 2, S0436: 2, L0589: 2, L0604: 2, L0601: 2, H0542: 2, S0424: 2, L0411: 1, H0624: 1, H0170: 1, L0615: 1, H0265: 1, |
| | | | | S0342: 1, S6024: 1, S0134: 1, H0657: 1, S0212: 1, H0450: 1, S0420: 1, L0005: 1, S0444: 1, H0580: 1, H0741: 1, S0045: 1, S0476: 1, |
| | | | | H0393: 1, H0550: 1, H0441: 1, H0370: 1, H0600: 1, H0586: 1, H0587: 1, H0486: 1, H0250: 1, H0635: 1, L0021: 1, S0182: 1, |
| | | | | L0563: 1, H0052: 1, H0309: 1, H0046: 1, L0157: 1, H0566: 1, H0081: 1, H0050: 1, H0057: 1, S0051: 1, S0318: 1, S0316: 1, H0687: 1, |
| | | | | S0250: 1, H0615: 1, H0428: 1, H0039: 1, L0483: 1, H0553: 1, L0055: 1, H0032: 1, H0673: 1, S0366: 1, H0038: 1, H0634: 1, H0380: 1, |
| | | | | H0488: 1, H0623: 1, H0059: 1, S0112: 1, L0351: 1, H0641: 1, H0646: 1, S0344: 1, S0002: 1, S0426: 1, L0638: 1, L4747: 1, L0761: 1, |
| | | | | L0627: 1, L0372: 1, L0646: 1, L0374: 1, L0644: 1, L0771: 1, L0767: 1, L0768: 1, L0549: 1, L0550: 1, L0533: 1, L0804: 1, L0650: 1, |
| | | | | L0375: 1, L0651: 1, L0523: 1, L0655: 1, L0782: 1, L0790: 1, L0663: 1, L0664: 1, S0148: 1, L0352: 1, H0520: 1, H0519: 1, S0126: 1, |
| | | | | H0672: 1, H0754: 1, S0152: 1, H0522: 1, H0696: 1, S0044: 1, S0406: 1, L0612: 1, S3012: 1, L0746: 1, L0786: 1, L0759: 1, H0445: 1, |
| | | | | L0684: 1, L0608: 1, H0667: 1, S0276: 1 and H0422: 1. |
| 35 | HEBFR46 | 847064 | 45 | AR313: 58, AR039: 47, AR300: 30, AR096: 29, AR299: 29, AR277: 28, AR089: 27, AR185: 27, AR316: 22, AR219: 22, AR104: 21, |
| | | | | AR218: 20, AR240: 20, AR282: 15, AR060: 15, AR055: 11, AR283: 7, H0457: 10, H0550: 5, H0436: 5, H0549: 4, H0616: 4, |
| | | | | L0519: 4, H0556: 3, H0580: 3, S0007: 3, S0046: 3, L0809: 3, L0747: 3, L0777: 3, S0436: 3, H0295: 2, T0040: 2, H0266: 2, L0761: 2, |
| | | | | L0783: 2, L0789: 2, H0658: 2, H0521: 2, L0753: 2, L0731: 2, L0596: 2, H0543: 2, S0040: 1, S0116: 1, S0282: 1, H0662: 1, H0402: 1, |
| | | | | H0125: 1, L0534: 1, L0562: 1, S0356: 1, S0358: 1, H0749: 1, L3816: 1, H0559: 1, H0069: 1, H0599: 1, H0618: 1, H0253: 1, H0581: 1, |
| | | | | H0546: 1, H0123: 1, S0051: 1, H0083: 1, H0687: 1, H0284: 1, H0124: 1, H0038: 1, H0551: 1, H0623: 1, S0038: 1, T0041: 1, S0440: 1, |
| | | | | S0150: 1, L3818: 1, S0002: 1, L0763: 1, L0769: 1, L5575: 1, L0627: 1, L0800: 1, L0662: 1, L0803: 1, L0793: 1, L0666: 1, L2264: 1, |
| | | | | L3825: 1, L3827: 1, L3828: 1, H0547: 1, H0519: 1, H0539: 1, S0037: 1, S0206: 1, L0748: 1, L0749: 1, H0595: 1, L0593: 1, S0194: 1 |
| | | | | and S0276: 1. |
| 36 | HEOMC46 | 866171 | 46 | AR277: 48, AR283: 34, AR219: 31, AR218: 30, AR316: 28, AR313: 27, AR282: 27, AR089: 25, AR299: 23, AR240: 23, AR096: 22, |
| | | | | AR039: 22, AR104: 20, AR185: 20, AR300: 19, AR055: 19, AR060: 13, H0749: 2, H0581: 2, H0457: 2 and S0116: 1. |
| 37 | HFCDW95 | 847383 | 47 | L0766: 9, L0803: 8, H0341: 7, H0521: 7, L0770: 6, L0771: 6, L0754: 6, L0752: 6, L0731: 6, S0354: 5, S0422: 5, L0662: 5, H0519: 5, |
| | | | | L0439: 5, L0779: 5, L0758: 5, S0436: 5, H0009: 4, H0673: 4, L0800: 4, L0521: 4, L0805: 4, L0659: 4, L0809: 4, L0438: 4, S0028: 4, |
| | | | | L0485: 4, L0601: 4, H0657: 3, H0638: 3, S0418: 3, H0733: 3, S0007: 3, S0222: 3, L3655: 3, S0214: 3, H0529: 3, L0369: 3, L0794: 3, |
| | | | | L0649: 3, L0776: 3, L0665: 3, L3391: 3, H0144: 3, H0670: 3, S0406: 3, L0756: 3, L0755: 3, L0759: 3, H0667: 3, S0420: 2, S0358: 2, |
| | | | | S0360: 2, H0580: 2, H0729: 2, S0476: 2, H0645: 2, S6026: 2, S0300: 2, L2543: 2, H0156: 2, S0010: 2, H0085: 2, H0178: 2, H0375: 2, |
| | | | | S6028: 2, H0266: 2, S0003: 2, H0428: 2, H0169: 2, S0036: 2, H0090: 2, H0634: 2, L0640: 2, L0769: 2, L0637: 2, L0761: 2, L0646: 2, |
| | | | | L0774: 2, L0775: 2, L0806: 2, L0807: 2, L0783: 2, L5622: 2, L0666: 2, L2653: 2, L2264: 2, H0725: 2, L3827: 2, H0547: 2, H0435: 2, |
| | | | | H0659: 2, S0380: 2, S3014: 2, S0206: 2, L0740: 2, L0753: 2, L0757: 2, S0434: 2, L0596: 2, H0668: 2, H0542: 2, H0170: 1, H0556: 1, |
| | | | | S0342: 1, H0713: 1, H0717: 1, H0716: 1, H0294: 1, L2877: 1, T0049: 1, S0218: 1, L2910: 1, L2915: 1, L2991: 1, S0282: 1, S0400: 1, |
| | | | | L2289: 1, H0241: 1, H0402: 1, L0534: 1, L0539: 1, S0376: 1, S0444: 1, S0410: 1, H0329: 1, H0722: 1, H0728: 1, H0734: 1, S0045: 1, |
| | | | | H0749: 1, H0406: 1, H0411: 1, H0443: 1, S0220: 1, H0441: 1, H0415: 1, H0438: 1, H0362: 1, H0333: 1, H0574: 1, L0623: 1, |
| | | | | H0486: 1, L1819: 1, T0060: 1, H0013: 1, H0427: 1, H0599: 1, H0575: 1, H0318: 1, S0474: 1, H0581: 1, H0374: 1, T0110: 1, |
| | | | | H0150: 1, H0563: 1, H0050: 1, H0014: 1, S0388: 1, S0051: 1, H0687: 1, H0039: 1, H0030: 1, H0553: 1, H0644: 1, H0628: 1, |
| | | | | H0166: 1, L0455: 1, H0708: 1, S0366: 1, H0591: 1, H0038: 1, H0551: 1, H0380: 1, H0623: 1, S0386: 1, T0042: 1, H0494: 1, H0561: 1, |
| | | | | S0370: 1, H0509: 1, H0130: 1, H0641: 1, L0598: 1, L0763: 1, L0638: 1, L0796: 1, L0667: 1, L0630: 1, L0373: 1, L0641: 1, L0773: 1, |
| | | | | L5569: 1, L5574: 1, L0381: 1, L0655: 1, L0607: 1, L0661: 1, L0527: 1, L0518: 1, L5623: 1, L0787: 1, L0789: 1, L0790: 1, L0792: 1, |
| | | | | L0793: 1, L0710: 1, L2262: 1, L2380: 1, L2412: 1, S0374: 1, H0520: 1, S0126: 1, H0648: 1, H0710: 1, H0522: 1, H0696: 1, H0555: 1, |
| | | | | H0436: 1, S0392: 1, S3012: 1, L0742: 1, L0745: 1, L0747: 1, L0749: 1, L0777: 1, L0593: 1, L0366: 1, S0026: 1, S0242: 1, S0276: 1, |
| | | | | S0196: 1, H0543: 1, H0423: 1, S0460: 1, L3357: 1 and L3372: 1. |
| 38 | HFEBO17 | 852218 | 48 | AR089: 12, AR218: 11, AR060: 10, AR299: 10, AR219: 10, AR313: 9, AR055: 9, AR316: 9, AR240: 8, AR282: 8, AR096: 8, |
| | | | | AR185: 8, AR104: 7, AR039: 7, AR277: 7, AR300: 6, AR283: 4, L0803: 4, L0438: 4, L0766: 2, L0526: 2, H0659: 2, S0444: 1, |
| | | | | S0408: 1, H0421: 1, H0081: 1, H0050: 1, S0370: 1, L0770: 1, L0637: 1, L0646: 1, L0800: 1, L0662: 1, L0804: 1, L0607: 1, L0659: 1, L0790: 1, L0665: 1, L0352: 1, |
| | | | | H0648: 1, H0651: 1, S0328: 1, H0436: 1, L0749: 1, L0750: 1, L0777: 1, L0752: 1, L0599: 1, S0242: 1 |
| | | | | and H0422: 1. |
| 39 | HFIJA29 | 839206 | 49 | AR263: 10, AR184: 8, AR313: 5, AR241: 5, AR251: 5, AR039: 4, AR052: 4, AR198: 4, AR192: 4, AR204: 4, AR312: 4, AR183: 4, |
| | | | | AR296: 4, AR282: 3, AR096: 3, AR268: 3, AR229: 3, AR182: 3, AR285: 3, AR053: 3, AR270: 3, AR269: 3, AR299: 3, AR309: 3, |
| | | | | AR316: 3, AR089: 3, AR291: 3, AR247: 3, AR238: 3, AR298: 3, AR266: 3, AR277: 2, AR185: 2, AR248: 2, AR213: 2, AR177: 2, |
| | | | | AR289: 2, AR202: 2, AR290: 2, AR300: 2, AR186: 2, AR240: 2, AR295: 2, AR246: 2, AR293: 2, AR226: 2, AR292: 2, AR284: 2, |
| | | | | AR294: 2, AR234: 2, AR175: 2, AR227: 2, AR258: 2, AR253: 2, AR286: 2, AR256: 2, AR233: 2, AR259: 2, AR231: 2, AR237: 1, |
| | | | | AR060: 1, AR033: 1, AR219: 1, AR244: 1, AR271: 1, AR104: 1, AR267: 1, AR232: 1, AR218: 1, AR055: 1, L0766: 20, L0754: 10, |
| | | | | L0776: 8, L0803: 5, L0749: 5, H0661: 4, L0740: 4, L0751: 4, L0608: 4, L0770: 3, L0750: 3, L0761: 2, L0794: 2, L0806: 2, L0783: 2, |
| | | | | L0809: 2, L0789: 2, L0438: 2, S0404: 2, L0745: 2, L0777: 2, L0755: 2, L0758: 2, S0134: 1, H0638: 1, S0358: 1, S0408: 1, S0045: 1, |
| | | | | S0046: 1, H0581: 1, H0023: 1, H0355: 1, S0214: 1, L0055: 1, H0477: 1, L0796: 1, L3905: 1, L0772: 1, L0646: 1, L0800: 1, L0642: 1, |
| | | | | L0764: 1, L0773: 1, L0363: 1, L0768: 1, L0804: 1, L0774: 1, L0805: 1, L0655: 1, L0807: 1, L0526: 1, L0531: 1, H0689: 1, S0378: 1, |
| | | | | S0152: 1, S0406: 1, H0732: 1, L0742: 1, L0748: 1, L0747: 1, L0753: 1, L0757: 1, S0194: 1, H0422: 1 and S0424: 1. |
| 40 | HFKFX64 | 566835 | 50 | AR273: 15, AR244: 9, AR274: 9, AR192: 9, AR184: 8, AR186: 8, AR204: 8, AR052: 7, AR243: 7, AR202: 7, AR269: 7, AR271: 6, |
| | | | | AR198: 6, AR206: 6, AR312: 6, AR246: 6, AR247: 6, AR241: 5, AR213: 5, AR275: 5, AR309: 5, AR253: 5, AR061: 5, AR055: 5, |
| | | | | AR267: 5, AR182: 5, AR060: 5, AR268: 4, AR053: 4, AR282: 4, AR205: 4, AR194: 4, AR185: 4, AR033: 3, AR183: 3, AR277: 3, |
| | | | | AR270: 3, AR240: 3, AR266: 3, AR310: 3, AR104: 3, AR291: 3, AR313: 3, AR248: 3, AR219: 3, AR249: 3, AR265: 3, AR251: 3, |
| | | | | AR300: 3, AR295: 2, AR229: 2, AR237: 2, AR294: 2, AR299: 2, AR218: 2, AR293: 2, AR233: 2, AR238: 2, AR283: 2, AR292: 2, |
| | | | | AR175: 2, AR226: 2, AR316: 2, AR039: 2, AR089: 2, AR227: 2, AR296: 2, AR231: 2, AR234: 2, AR289: 2, AR096: 2, AR298: 2, |
| | | | | AR177: 2, AR286: 1, AR259: 1, AR256: 1, AR179: 1, AR263: 1, H0012: 3 and L0809: 1. |
| 41 | HGBER72 | 826710 | 51 | AR313: 68, AR039: 56, AR299: 36, AR185: 31, AR096: 30, AR300: 28, AR277: 27, AR089: 27, AR219: 25, AR316: 22, AR218: 21, |
| | | | | AR104: 20, AR282: 17, AR060: 15, AR240: 14, AR055: 11, AR283: 7, L0766: 12, H0436: 9, H0543: 8, L0769: 6, L0749: 6, |
| | | | | L0731: 6, H0556: 5, L0655: 5, S0434: 5, L0439: 4, L0758: 4, S0114: 3, H0255: 3, L3904: 3, L0794: 3, L0776: 3, L0659: 3, L0783: 3, |
| | | | | L0809: 3, L0751: 3, H0423: 3, S0358: 2, S0360: 2, S0007: 2, H0549: 2, H0550: 2, H0486: 2, H0014: 2, S0388: 2, H0424: 2, H0031: 2, |
| | | | | H0628: 2, L5575: 2, L0771: 2, L0662: 2, L0791: 2, L0793: 2, L2265: 2, L0438: 2, S0328: 2, L0740: 2, L0756: 2, H0265: 1, H0686: 1, |
| | | | | S0134: 1, H0657: 1, H0656: 1, S0001: 1, S0418: 1, L0619: 1, S0442: 1, S0408: 1, H0730: 1, H0749: 1, H0619: 1, H0351: 1, S0222: 1, |
| | | | | H0592: 1, H0586: 1, T0060: 1, H0250: 1, H0618: 1, H0318: 1, H0052: 1, H0251: 1, H0545: 1, H0569: 1, H0012: 1, H0201: 1, |
| | | | | S6028: 1, H0288: 1, H0622: 1, T0023: 1, L0483: 1, H0604: 1, S0036: 1, H0135: 1, H0040: 1, H0264: 1, S0039: 1, L0640: 1, L0763: 1, |
| | | | | L0770: 1, L0761: 1, L0648: 1, L0521: 1, L0533: 1, L0774: 1, L0775: 1, L0376: 1, L0378: 1, L0629: 1, L5623: 1, L0666: 1, L0664: 1, |
| | | | | S0310: 1, L3811: 1, H0689: 1, H0659: 1, H0660: 1, H0648: 1, H0696: 1, H0576: 1, S0028: 1, L0742: 1, L0750: 1, L0779: 1, L0777: 1, |
| | | | | L0752: 1, L0591: 1, L0601: 1, H0542: 1 and H0506: 1. |
| 42 | HGBGN34 | 648659 | 52 | AR240: 13, AR060: 11, AR055: 10, AR218: 7, AR096: 7, AR185: 7, AR282: 7, AR089: 6, AR283: 6, AR300: 6, AR299: 6, |
| | | | | AR104: 5, AR316: 5, AR277: 4, AR313: 3, AR039: 3, AR219: 2, L0747: 5, H0716: 2, H0427: 2, S0280: 2, H0662: 1, S0444: 1, |
| | | | | H0441: 1, H0492: 1, T0001: 1, H0014: 1, H0030: 1, H0674: 1, L5575: 1, L0659: 1, S0330: 1, L0752: 1 and S0436: 1. |
| 43 | HGLBG15 | 701990 | 53 | AR055: 14, AR162: 7, AR161: 7, AR163: 7, AR104: 6, AR060: 6, AR218: 6, AR191: 6, AR089: 6, AR197: 6, AR261: 6, AR269: 5, |
| | | | | AR170: 5, AR176: 5, AR165: 5, AR185: 5, AR188: 5, AR164: 5, AR189: 5, AR291: 5, AR166: 5, AR246: 5, AR190: 5, AR096: 5, |
| | | | | AR257: 4, AR240: 4, AR243: 4, AR288: 4, AR309: 4, AR272: 4, AR316: 4, AR275: 4, AR270: 4, AR175: 4, AR290: 4, AR274: 4, |
| | | | | AR053: 4, AR219: 4, AR289: 4, AR264: 4, AR255: 4, AR199: 4, AR268: 4, AR204: 4, AR286: 4, AR271: 4, AR039: 4, AR205: 3, |
| | | | | AR173: 3, AR196: 3, AR233: 3, AR287: 3, AR262: 3, AR215: 3, AR267: 3, AR300: 3, AR200: 3, AR177: 3, AR296: 3, AR181: 3, |
| | | | | AR283: 3, AR299: 3, AR295: 3, AR239: 3, AR311: 3, AR282: 3, AR297: 3, AR174: 3, AR285: 3, AR294: 3, AR293: 3, AR168: 3, |
| | | | | AR201: 3, AR238: 3, AR235: 3, AR217: 3, AR313: 3, AR198: 3, AR312: 3, AR258: 3, AR203: 3, AR178: 3, AR254: 3, AR211: 2, |
| | | | | AR263: 2, AR247: 2, AR193: 2, AR237: 2, AR266: 2, AR277: 2, AR256: 2, AR182: 2, AR171: 2, AR210: 2, AR250: 2, AR260: 2, |
| | | | | AR195: 2, AR172: 2, AR207: 2, AR236: 2, AR232: 2, AR221: 2, AR226: 2, AR224: 2, AR216: 1, AR179: 1, AR033: 1, AR061: 1, |
| | | | | AR252: 1, L0803: 19, S0474: 17, L0748: 13, S0408: 11, H0351: 11, L2669: 11, L2504: 10, L0770: 10, L0805: 9, L0439: 9, L0754: 9, |
| | | | | S0422: 8, L0809: 8, L0794: 6, L0755: 6, L0731: 6, L0758: 6, S0360: 5, H0265: 4, S0414: 4, H0581: 4, H0271: 4, L0771: 4, L0804: 4, |
| | | | | L0776: 4, L0659: 4, L0666: 4, L0749: 4, L0591: 4, H0327: 3, L0806: 3, L0655: 3, L0636: 3, L0565: 3, H0436: 3, L0777: 3, S0434: 3, |
| | | | | S0436: 3, S0412: 3, S0116: 2, S0212: 2, H0661: 2, S0358: 2, S0132: 2, L3388: 2, S0222: 2, H0123: 2, H0266: 2, S0003: 2, H0031: 2, |
| | | | | H0551: 2, L0598: 2, L0638: 2, L0662: 2, L0766: 2, L0650: 2, L0664: 2, L0665: 2, S0374: 2, H0547: 2, H0435: 2, H0660: 2, S0378: 2, |
| | | | | L0740: 2, L0750: 2, L0756: 2, L0752: 2, H0624: 1, H0556: 1, S0040: 1, H0295: 1, S0114: 1, H0656: 1, L2904: 1, S0001: 1, H0671: 1, |
| | | | | S0356: 1, S0442: 1, S0376: 1, S0444: 1, H0675: 1, H0730: 1, H0741: 1, H0208: 1, S0045: 1, S0476: 1, H0393: 1, H0550: 1, H0431: 1, |
| | | | | H0586: 1, H0642: 1, L3499: 1, H0013: 1, H0069: 1, H0635: 1, H0427: 1, H0156: 1, L0021: 1, H0042: 1, T0082: 1, H0590: 1, |
| | | | | S0010: 1, H0318: 1, H0251: 1, H0596: 1, L0040: 1, H0545: 1, H0457: 1, H0009: 1, N0006: 1, L0471: 1, H0024: 1, H0051: 1, |
| | | | | H0083: 1, H0061: 1, S0316: 1, H0687: 1, H0688: 1, H0644: 1, H0617: 1, H0591: 1, H0038: 1, H0040: 1, H0616: 1, H0264: 1, |
| | | | | H0100: 1, H0561: 1, S0440: 1, L2270: 1, S0426: 1, H0529: 1, L0763: 1, L0637: 1, L0761: 1, L0373: 1, L0646: 1, L0800: 1, L0764: 1, |
| | | | | L0626: 1, L0653: 1, L0606: 1, L0661: 1, L0515: 1, L5622: 1, L0789: 1, L0792: 1, L0793: 1, L0663: 1, L2653: 1, L2257: 1, L2259: 1, |
| | | | | L2261: 1, L2654: 1, H0144: 1, L0438: 1, H0520: 1, H0519: 1, H0659: 1, H0658: 1, S0328: 1, S0330: 1, S0380: 1, H0710: 1, H0521: 1, |
| | | | | H0522: 1, H0696: 1, S0044: 1, S0406: 1, S0027: 1, L0742: 1, L0744: 1, L0751: 1, L0745: 1, L0747: 1, L0779: 1, L0780: 1, L0757: 1, L0759: 1, S0031: 1, S0260: 1, |
| | | | | L0596: 1, L0605: 1, L0595: 1, S0026: 1, S0192: 1, S0242: 1, H0542: 1, H0543: 1, S0042: 1 and S0462: 1. |
| 44 | HHFEC39 | 609873 | 54 | AR055: 11, AR104: 8, AR060: 8, AR218: 7, AR277: 7, AR096: 6, AR300: 6, AR219: 6, AR299: 5, AR089: 5, AR283: 5, AR316: 5, |
| | | | | AR240: 5, AR039: 5, AR185: 4, AR282: 3, AR313: 3, L0805: 21, L0776: 19, L0751: 14, L0759: 13, L0770: 11, H0615: 8, L0803: 8, |
| | | | | L0438: 7, L0439: 7, L0758: 7, L0769: 6, L0521: 6, L0754: 6, H0624: 5, H0486: 5, L0500: 5, L0807: 5, L0740: 5, L0591: 5, H0716: 4, |
| | | | | H0351: 4, L0774: 4, H0144: 4, S0328: 4, L0748: 4, L0745: 4, L0604: 4, S0414: 3, H0013: 3, S0250: 3, H0428: 3, H0644: 3, H0591: 3, |
| | | | | L0659: 3, L0783: 3, L0809: 3, L0791: 3, L0793: 3, L0666: 3, H0670: 3, L0779: 3, L0777: 3, L0731: 3, H0583: 2, S0408: 2, L0717: 2, |
| | | | | S0280: 2, S0010: 2, H0052: 2, H0024: 2, T0010: 2, H0594: 2, H0266: 2, H0031: 2, H0032: 2, T0067: 2, L0796: 2, L0662: 2, L0794: 2, |
| | | | | L0806: 2, L0518: 2, L0792: 2, L3643: 1, S0342: 1, L0002: 1, H0657: 1, H0255: 1, H0305: 1, H0728: 1, H0733: 1, H0734: 1, S0007: 1, |
| | | | | H0645: 1, H0640: 1, H0369: 1, H0261: 1, H0549: 1, H0550: 1, S0222: 1, H0586: 1, T0040: 1, L3655: 1, L0021: 1, L0022: 1, L0105: 1, |
| | | | | T0071: 1, L0109: 1, H0194: 1, H0263: 1, H0566: 1, H0050: 1, L0471: 1, H0051: 1, S0051: 1, S0024: 1, H0355: 1, H0510: 1, H0271: 1, |
| | | | | L0328: 1, H0039: 1, H0622: 1, L0483: 1, H0124: 1, S0036: 1, H0038: 1, H0616: 1, H0412: 1, H0059: 1, H0100: 1, H0646: 1, |
| | | | | S0422: 1, S0002: 1, H0743: 1, H0529: 1, L0520: 1, L0640: 1, L0763: 1, L0773: 1, L0364: 1, L0649: 1, L0497: 1, L0526: 1, L0788: 1, |
| | | | | L0789: 1, L0663: 1, L0665: 1, S0374: 1, H0780: 1, H0547: 1, S0126: 1, H0689: 1, H0648: 1, S0330: 1, S0378: 1, H0522: 1, S0037: 1, |
| | | | | L0747: 1, L0750: 1, L0780: 1, L0752: 1, H0595: 1, S0434: 1, L0608: 1, L0594: 1, L0361: 1, L0603: 1, S0026: 1, S0192: 1, S0194: 1, |
| | | | | H0423: 1, S0398: 1, S0460: 1, H0506: 1, H0008: 1 and H0352: 1. |
| 45 | HHSDI53 | 862028 | 55 | AR313: 45, AR039: 43, AR300: 22, AR299: 22, AR096: 21, AR316: 20, AR185: 19, AR089: 19, AR277: 19, AR219: 15, AR240: 14, |
| | | | | AR104: 14, AR218: 13, AR282: 12, AR060: 11, AR055: 8, AR283: 4, L0766: 10, L0752: 8, L0439: 6, L0747: 6, L0740: 5, L0756: 5, |
| | | | | S0408: 4, L0779: 4, L0777: 4, L0731: 4, S0051: 3, H0169: 3, L0803: 3, L0774: 3, L0809: 3, L0754: 3, S0360: 2, H0574: 2, S0422: 2, |
| | | | | L0763: 2, L0805: 2, L0666: 2, L0663: 2, L0751: 2, L0755: 2, L0759: 2, L0601: 2, H0624: 1, S0040: 1, H0713: 1, S0114: 1, S0298: 1, |
| | | | | S0420: 1, S0444: 1, H0580: 1, H0730: 1, H0733: 1, L3388: 1, H0351: 1, H0600: 1, H0331: 1, H0013: 1, L0021: 1, H0575: 1, H0590: 1, |
| | | | | T0110: 1, H0012: 1, H0615: 1, H0031: 1, H0553: 1, H0591: 1, S0440: 1, H0646: 1, S0002: 1, L0772: 1, L0645: 1, L0773: 1, L0662: 1, |
| | | | | L0794: 1, L0381: 1, L0775: 1, L0776: 1, L0657: 1, L0659: 1, L0528: 1, L5622: 1, L0790: 1, H0547: 1, H0648: 1, H0539: 1, S0152: 1, |
| | | | | H0696: 1, S0044: 1, S0406: 1, S0028: 1, L0758: 1, S0434: 1, S0436: 1, L0366: 1, S0011: 1, S0276: 1, H0422: 1, S0398: 1 and |
| | | | | S0424: 1. |
| 46 | HISBA38 | 561711 | 56 | AR277: 1, L0766: 3, H0318: 1 and H0539: 1. |
| 47 | HJPBK28 | 638191 | 57 | L0794: 6, L0439: 5, L0759: 5, H0556: 4, L0771: 4, L0770: 3, L0643: 3, H0144: 3, H0156: 2, H0188: 2, H0090: 2, H0641: 2, |
| | | | | L0662: 2, L0766: 2, L0803: 2, L0776: 2, L0661: 2, L0659: 2, L0790: 2, H0522: 2, S0436: 2, H0295: 1, T0049: 1, H0583: 1, S0116: 1, |
| | | | | H0663: 1, H0662: 1, S0356: 1, S0376: 1, S0132: 1, H0586: 1, H0587: 1, H0486: 1, H0575: 1, H0748: 1, H0744: 1, H0309: 1, |
| | | | | L0231: 1, H0083: 1, H0271: 1, H0286: 1, H0622: 1, H0031: 1, L0455: 1, H0068: 1, H0063: 1, H0551: 1, H0264: 1, H0268: 1, |
| | | | | T0041: 1, H0494: 1, H0633: 1, L0637: 1, L3905: 1, L0800: 1, L0775: 1, L0806: 1, L0383: 1, L0809: 1, L0666: 1, L0663: 1, L0664: 1, |
| | | | | L2264: 1, L3827: 1, L3828: 1, H0519: 1, H0593: 1, H0435: 1, H0672: 1, H0436: 1, S0027: 1, L0740: 1, L0749: 1, L0731: 1, L0757: 1, |
| | | | | L0758: 1, H0136: 1, H0423: 1 and S0446: 1. |
| 48 | HKABU43 | 838573 | 58 | AR219: 2, AR282: 1, AR300: 1, AR316: 1, L0794: 7, L0803: 3, H0052: 2, S0250: 2, H0032: 2, H0494: 2, H0529: 2, L0666: 2, |
| | | | | L0663: 2, L0747: 2, L0759: 2, H0657: 1, H0664: 1, H0662: 1, S0442: 1, H0741: 1, H0735: 1, H0733: 1, S0046: 1, H0640: 1, H0331: 1, |
| | | | | H0559: 1, T0039: 1, H0013: 1, S0280: 1, H0318: 1, T0110: 1, H0024: 1, S0364: 1, H0591: 1, H0038: 1, H0040: 1, S0142: 1, L0640: 1, |
| | | | | L0667: 1, L0764: 1, L0662: 1, L0804: 1, L0659: 1, L0517: 1, L0789: 1, L4559: 1, L0664: 1, S0126: 1, H0435: 1, H0539: 1, S0152: 1, |
| | | | | H0521: 1, H0522: 1, S0027: 1, L0779: 1, L0758: 1, L0485: 1, L0601: 1, S0026: 1, H0667: 1, S0192: 1, H0542: 1 and H0506: 1. |
| 49 | HLYGE16 | 651339 | 59 | AR055: 2, AR185: 2, AR316: 1, AR060: 1, AR283: 1, H0255: 5, H0144: 3, H0429: 2, L0662: 2, L0794: 2, L0803: 2, L0809: 2, |
| | | | | L0758: 2, L0599: 2, H0542: 2, S0040: 1, H0650: 1, S0442: 1, H0642: 1, L0157: 1, H0571: 1, H0673: 1, H0494: 1, L0771: 1, L0766: 1, |
| | | | | L0776: 1, L0629: 1, L0657: 1, L0659: 1, L0792: 1, L0565: 1, H0345: 1, L0748: 1, L0754: 1, L0747: 1, L0749: 1, H0445: 1 and |
| | | | | S0242: 1. |
| 50 | HLYGY91 | 658703 | 60 | AR313: 6, AR316: 5, AR218: 3, AR300: 3, AR299: 3, AR055: 3, AR185: 2, AR039: 2, AR096: 2, AR277: 2, AR219: 1, AR089: 1 |
| | | | | H0692: 10, L0777: 10, L0805: 5, L0803: 3, L2497: 2, H0328: 2, L0662: 2, L0794: 2, L0809: 2, L3832: 2, L0748: 2, L0752: 2, |
| | | | | L0599: 2, H0170: 1, H0402: 1, S0444: 1, S0360: 1, H0747: 1, L2486: 1, L3503: 1, H0427: 1, H0644: 1, H0038: 1, L0800: 1, L0648: 1, |
| | | | | L0804: 1, H0670: 1, H0478: 1, L0731: 1, L0758: 1, H0445: 1, S0434: 1, L0591: 1 and L0362: 1. |
| 51 | HMCFH60 | 654853 | 61 | AR104: 113, AR219: 90, AR218: 87, AR089: 82, AR283: 79, AR277: 79, AR313: 78, AR055: 75, AR240: 71, AR316: 70, |
| | | | | AR185: 63, AR282: 60, AR299: 59, AR096: 54, AR039: 50, AR060: 48, AR300: 38 L0659: 10, T0040: 9, L0665: 9, L0759: 9, |
| | | | | L0519: 8, L0776: 7, S0436: 7, L0744: 6, L0747: 6, L0749: 6, L0758: 6, S0418: 5, H0052: 5, H0457: 5, H0150: 5, L0769: 5, L0766: 5, |
| | | | | L0748: 5, H0265: 4, S0420: 4, S0356: 4, S0360: 4, S0046: 4, S0010: 4, H0545: 4, H0687: 4, H0494: 4, S0440: 4, L0662: 4, L0768: 4, |
| | | | | L0774: 4, L0775: 4, L0751: 4, L0754: 4, L0779: 4, H0484: 3, H0734: 3, H0549: 3, H0599: 3, H0421: 3, H0620: 3, S0051: 3, L0764: 3, |
| | | | | L0666: 3, H0435: 3, H0648: 3, H0539: 3, L0596: 3, H0543: 3, H0624: 2, H0171: 2, H0556: 2, H0295: 2, H0657: 2, H0656: 2, |
| | | | | S0354: 2, S0358: 2, S0376: 2, S0408: 2, S0007: 2, S0132: 2, S0476: 2, S0222: 2, H0486: 2, T0039: 2, H0635: 2, H0156: 2, H0618: 2, |
| | | | | T0048: 2, H0581: 2, H0544: 2, H0373: 2, H0428: 2, T0006: 2, H0604: 2, H0031: 2, H0551: 2, T0067: 2, H0264: 2, H0647: 2, |
| | | | | S0344: 2, L0638: 2, L0372: 2, L0641: 2, L0806: 2, L0653: 2, L0527: 2, L0809: 2, L0565: 2, L0438: 2, H0519: 2, H0689: 2, H0658: 2, |
| | | | | H0672: 2, S0330: 2, S0406: 2, H0436: 2, S0027: 2, L0750: 2, S0434: 2, L0605: 2, S0194: 2, H0506: 2, H0685: 1, H0713: 1, H0717: 1, |
| | | | | H0740: 1, H0294: 1, S0212: 1, S0110: 1, S0282: 1, H0483: 1, S0442: 1, H0637: 1, H0733: 1, S0468: 1, H0747: 1, L3388: 1, H0351: 1, |
| | | | | H0550: 1, H0587: 1, H0642: 1, H0559: 1, L0622: 1, L3653: 1, H0013: 1, H0250: 1, H0069: 1, S0280: 1, H0706: 1, S0346: 1, H0705: 1, |
| | | | | H0318: 1, S0049: 1, H0748: 1, L0040: 1, H0597: 1, L0738: 1, H0009: 1, H0563: 1, H0123: 1, H0050: 1, L0471: 1, H0012: 1, |
| | | | | H0024: 1, H0014: 1, S0388: 1, H0239: 1, H0594: 1, S6028: 1, H0271: 1, H0292: 1, H0213: 1, H0628: 1, H0673: 1, H0068: 1, |
| | | | | S0036: 1, H0135: 1, H0090: 1, H0038: 1, H0634: 1, H0087: 1, H0488: 1, H0268: 1, H0412: 1, H0413: 1, S0038: 1, T0042: 1, |
| | | | | H0560: 1, H0641: 1, S0210: 1, S0422: 1, S0002: 1, H0529: 1, L0770: 1, L0637: 1, L3905: 1, L5566: 1, L0761: 1, L0772: 1, L0646: 1, |
| | | | | L0374: 1, L0771: 1, L4500: 1, L0651: 1, L0784: 1, L0807: 1, L0657: 1, L0658: 1, L0656: 1, L0782: 1, L0783: 1, L0530: 1, L0647: 1, |
| | | | | L0788: 1, L0663: 1, L0664: 1, S0216: 1, H0693: 1, L3826: 1, H0520: 1, H0547: 1, S0126: 1, H0682: 1, H0659: 1, S0328: 1, S0380: 1, |
| | | | | H0710: 1, H0521: 1, H0522: 1, H0627: 1, S0028: 1, L0741: 1, L0742: 1, L0439: 1, L0740: 1, L0756: 1, L0786: 1, L0780: 1, L0755: 1, |
| | | | | L0581: 1, L0595: 1, L0601: 1, H0667: 1, S0192: 1, H0542: 1, L0718: 1 and S0424: 1. |
| 52 | HMIAK10 | 562774 | 62 | AR055: 7, AR218: 7, AR060: 6, AR219: 6, AR185: 4, AR283: 4, AR240: 4, AR300: 4, AR104: 3, AR089: 3, AR299: 3, AR039: 3, |
| | | | | AR316: 2, AR277: 2, AR096: 2, AR313: 2, AR282: 2, S6028: 1 |
| 53 | HMIBD93 | 634227 | 63 | AR277: 111, AR283: 78, AR219: 72, AR316: 65, AR104: 61, AR055: 58, AR089: 55, AR218: 54, AR313: 49, AR282: 48, |
| | | | | AR299: 47, AR039: 44, AR185: 41, AR096: 39, AR240: 36, AR060: 33, AR300: 31, L0439: 6, L0751: 5, L0770: 3, L0769: 3, |
| | | | | L0764: 3, H0617: 2, L0766: 2, L0752: 2, H0445: 2, S6024: 1, H0351: 1, S0222: 1, H0586: 1, S0010: 1, S6028: 1, L0768: 1, L0794: 1, |
| | | | | L0438: 1, L0747: 1, L0753: 1 and L0758: 1. |
| 54 | HMWJF53 | 758158 | 64 | H0255: 7, H0318: 5, H0620: 5, L0754: 5, L0766: 4, L0666: 4, S0358: 3, H0457: 3, H0135: 3, L0776: 3, L0809: 3, H0696: 3, |
| | | | | S3012: 3, H0624: 2, H0295: 2, H0254: 2, H0662: 2, H0402: 2, H0305: 2, S0132: 2, L0717: 2, L0021: 2, H0617: 2, H0673: 2, L0769: 2, |
| | | | | L0638: 2, L0796: 2, L0667: 2, L0662: 2, L0653: 2, L0783: 2, L0663: 2, S0126: 2, H0539: 2, H0521: 2, S0044: 2, S0027: 2, L0745: 2, |
| | | | | L0747: 2, L0755: 2, L0587: 2, H0352: 2, H0170: 1, H0556: 1, H0657: 1, H0341: 1, S0212: 1, S0418: 1, S0360: 1, S0410: 1, H0339: 1, |
| | | | | H0549: 1, S0222: 1, H0441: 1, H0331: 1, H0486: 1, H0427: 1, H0575: 1, T0048: 1, H0581: 1, H0052: 1, H0545: 1, H0150: 1, |
| | | | | H0570: 1, H0569: 1, L0163: 1, H0083: 1, H0355: 1, H0252: 1, H0039: 1, T0023: 1, H0124: 1, H0090: 1, H0413: 1, H0560: 1, |
| | | | | H0561: 1, S0372: 1, H0509: 1, H0652: 1, S0144: 1, S0422: 1, L0762: 1, L0770: 1, L0761: 1, L0373: 1, L0372: 1, L0645: 1, L0764: 1, |
| | | | | L0771: 1, L0648: 1, L0768: 1, L0649: 1, L0804: 1, L0651: 1, L0806: 1, L0655: 1, L0659: 1, L0517: 1, L0528: 1, L0665: 1, H0698: 1, |
| | | | | S0374: 1, L0438: 1, H0684: 1, H0658: 1, H0670: 1, S0328: 1, S0380: 1, H0134: 1, S0406: 1, L0743: 1, L0749: 1, L0750: 1, L0779: 1, |
| | | | | L0759: 1, S0031: 1, H0445: 1, H0653: 1, S0194: 1, S0276: 1, H0542: 1 and S0460: 1. |
| 55 | HNECL22 | 799541 | 65 | AR218: 10, AR219: 10, AR185: 10, AR277: 9, AR283: 8, AR282: 8, AR039: 8, AR089: 8, AR316: 7, AR055: 7, AR096: 7, |
| | | | | AR104: 7, AR240: 7, AR299: 6, AR313: 6, AR060: 5, AR300: 5, L0748: 54, L0766: 20, L0754: 18, H0179: 12, L0777: 12, |
| | | | | L0750: 11, L0749: 10, S0116: 9, H0271: 9, L0761: 9, H0031: 8, L0794: 8, H0144: 8, L0744: 8, H0457: 7, S0356: 6, H0393: 6, |
| | | | | H0013: 6, L0438: 6, L0743: 6, L0751: 6, L0745: 6, L0779: 6, L0758: 6, H0421: 5, L0805: 5, H0436: 5, H0305: 4, H0599: 4, H0050: 4, |
| | | | | L0769: 4, L0646: 4, L0771: 4, L0803: 4, L0776: 4, L0809: 4, S0428: 4, L0603: 4, H0662: 3, S0358: 3, S0045: 3, H0747: 3, H0549: 3, |
| | | | | H0497: 3, S0474: 3, H0674: 3, H0591: 3, H0625: 3, S0422: 3, L0800: 3, L0773: 3, L0792: 3, L0666: 3, S0052: 3, S0028: 3, L0759: 3, |
| | | | | H0542: 3, H0556: 2, H0341: 2, H0402: 2, S0354: 2, S0376: 2, S0046: 2, H0559: 2, H0575: 2, H0590: 2, H0581: 2, H0024: 2, |
| | | | | H0266: 2, H0553: 2, H0032: 2, H0673: 2, H0087: 2, H0264: 2, H0100: 2, H0494: 2, H0529: 2, L0774: 2, L0493: 2, L0659: 2, |
| | | | | L0790: 2, L0664: 2, H0518: 2, S0044: 2, L0747: 2, L0780: 2, L0752: 2, L0605: 2, L0599: 2, L0593: 2, H0721: 2, H0171: 1, L3642: 1, |
| | | | | L3644: 1, S0114: 1, H0583: 1, L0785: 1, H0419: 1, H0255: 1, H0589: 1, H0638: 1, H0125: 1, S0418: 1, S0444: 1, H0151: 1, S0476: 1, |
| | | | | H0619: 1, S6026: 1, H0261: 1, H0431: 1, H0392: 1, H0069: 1, H0075: 1, H0635: 1, T0070: 1, H0156: 1, H0618: 1, S0010: 1, |
| | | | | H0318: 1, H0310: 1, H0052: 1, H0251: 1, T0110: 1, H0046: 1, H0439: 1, H0086: 1, H0081: 1, H0057: 1, H0051: 1, H0375: 1, |
| | | | | S0002: 1, S0426: 1, L0598: 1, L0641: 1, L0764: 1, L0768: 1, L0807: 1, L0514: 1, L0658: 1, L0783: 1, L5623: 1, L0788: 1, L0663: 1, |
| | | | | L0665: 1, S0374: 1, H0519: 1, S0122: 1, H0659: 1, H0658: 1, H0666: 1, H0672: 1, S0328: 1, H0521: 1, H0522: 1, S0406: 1, H0555: 1, |
| | | | | H0478: 1, H0727: 1, L0742: 1, L0755: 1, L0731: 1, S0011: 1, S0026: 1, H0543: 1, H0423: 1, H0422: 1 and H0506: 1. |
| 56 | HNFAC50 | 815676 | 66 | AR055: 8, AR277: 6, AR060: 5, AR282: 5, AR299: 5, AR283: 5, AR039: 5, AR240: 5, AR104: 4, AR300: 4, AR218: 4, AR089: 4, |
| | | | | AR185: 4, AR096: 3, AR316: 3, AR313: 2, AR219: 1, L0769: 5, L0756: 4, S0444: 3, L0774: 3, H0624: 2, S0408: 2, H0587: 2, |
| | | | | L0764: 2, L0766: 2, H0170: 1, H0497: 1, H0333: 1, H0156: 1, L0022: 1, H0271: 1, S0344: 1, L0637: 1, L0772: 1, L0773: 1, L0662: 1, |
| | | | | L0775: 1, L0809: 1, L0791: 1, L0663: 1, H0144: 1, S0374: 1, L3811: 1, H0593: 1, H0660: 1, H0648: 1, H0672: 1, H0696: 1, L0749: 1, |
| | | | | L0750: 1, L0779: 1, L0752: 1, L0755: 1, L0599: 1, L0601: 1 and H0667: 1. |
| 57 | HNGEA34 | 815678 | 67 | AR055: 6, AR060: 5, AR240: 4, AR218: 4, AR282: 3, AR300: 3, AR104: 3, AR277: 3, AR283: 3, AR185: 3, AR089: 3, AR096: 2, |
| | | | | AR316: 2, AR219: 2, AR039: 2, AR313: 2, AR299: 2, H0393: 1 and S0052: 1. |
| 58 | HNGIV64 | 561572 | 68 | AR185: 8, AR039: 8, AR060: 8, AR313: 7, AR055: 7, AR096: 6, AR300: 6, AR089: 6, AR240: 6, AR218: 6, AR299: 6, AR277: 6, |
| | | | | AR316: 5, AR104: 5, AR283: 4, AR282: 3, AR219: 1, S0052: 1 |
| 59 | HNGKT41 | 836061 | 69 | AR316: 11, AR055: 6, AR060: 6, AR277: 5, AR300: 5, AR282: 5, AR104: 4, AR240: 4, AR185: 4, AR218: 3, AR283: 3, AR313: 3, AR039: 3, AR089: 3, AR219: 3, |
| | | | | AR096: 2, AR299: 2, S0428: 1 |
| 60 | HNGNO53 | 836063 | 70 | AR055: 7, AR060: 6, AR240: 5, AR300: 5, AR218: 5, AR185: 4, AR283: 4, AR299: 4, AR277: 4, AR089: 4, AR104: 3, AR316: 3, |
| | | | | AR096: 3, AR219: 2, AR313: 2, AR039: 2, AR282: 1, S0428: 2 and L0439: 1. |
| 61 | HNHCT47 | 634691 | 71 | AR313: 39, AR039: 38, AR219: 29, AR218: 24, AR299: 23, AR185: 22, AR096: 21, AR089: 20, AR300: 17, AR316: 15, AR060: 14, |
| | | | | AR277: 14, AR104: 13, AR055: 12, AR240: 11, AR282: 10, AR283: 8, S0053: 2 and S0046: 1. |
| 62 | HNHKI74 | 777856 | 72 | S0216: 1 |
| 63 | HORBS82 | 638293 | 73 | H0706: 2, L0809: 2, S0360: 1, L0623: 1, H0122: 1, H0041: 1, H0095: 1, H0292: 1, H0424: 1, S0364: 1, L0794: 1, L0787: 1, |
| | | | | L0663: 1, H0780: 1, H0435: 1, L0743: 1, L0747: 1 and L0731: 1. |
| 64 | HOUDE92 | 580866 | 74 | H0052: 17, L0745: 11, L0748: 10, H0547: 7, L0439: 7, L0755: 6, L0771: 5, L0774: 5, L0662: 4, L0746: 4, L0777: 4, S0474: 3, |
| | | | | L0163: 3, H0059: 3, H0100: 3, L0775: 3, L0741: 3, H0261: 2, H0333: 2, H0194: 2, H0545: 2, H0012: 2, H0617: 2, H0135: 2, |
| | | | | L0770: 2, L0665: 2, L0438: 2, H0520: 2, L0747: 2, L0752: 2, L0753: 2, S0040: 1, L0717: 1, H0437: 1, H0550: 1, S6016: 1, H0497: 1, |
| | | | | H0574: 1, H0599: 1, H0575: 1, H0618: 1, H0253: 1, H0041: 1, H0620: 1, H0373: 1, H0188: 1, H0124: 1, H0068: 1, H0040: 1, |
| | | | | H0561: 1, S0448: 1, S0210: 1, L0763: 1, L0644: 1, L0767: 1, L0768: 1, L0375: 1, L0651: 1, L0659: 1, L0540: 1, L5622: 1, H0144: 1, |
| | | | | H0593: 1, S0126: 1, H0539: 1, S0152: 1, H0694: 1, S0390: 1, S0028: 1, L0749: 1, L0786: 1, L0780: 1, L0731: 1, L0757: 1, L0758: 1, |
| | | | | S0436: 1, L0592: 1 and S0276: 1. |
| 65 | HOUFS04 | 771564 | 75 | AR218: 41, AR219: 38, AR096: 23, AR185: 23, AR277: 22, AR299: 22, AR282: 20, AR055: 18, AR316: 17, AR039: 16, AR089: 14, |
| | | | | AR240: 13, AR283: 13, AR104: 12, AR300: 10, AR313: 10, AR060: 10, L0745: 15, S0414: 6, H0351: 5, H0013: 5, S0422: 5, |
| | | | | L0803: 5, H0144: 4, H0413: 3, H0519: 3, L0754: 3, L0759: 3, S0242: 3, H0624: 2, H0580: 2, S0045: 2, L3655: 2, H0421: 2, H0375: 2, |
| | | | | H0428: 2, H0553: 2, L0598: 2, L0775: 2, L5622: 2, L0666: 2, L0664: 2, L0665: 2, H0520: 2, H0547: 2, S0126: 2, H0672: 2, S0380: 2, |
| | | | | H0521: 2, L0743: 2, L0744: 2, L0605: 2, H0171: 1, H0556: 1, H0685: 1, S0040: 1, S0114: 1, H0657: 1, S0212: 1, S0444: 1, H0733: 1, |
| | | | | H0734: 1, H0749: 1, S0132: 1, H0619: 1, L3388: 1, H0411: 1, S0278: 1, H0549: 1, S0222: 1, L3816: 1, H0486: 1, S0280: 1, H0575: 1, |
| | | | | L0105: 1, H0581: 1, H0052: 1, H0545: 1, H0594: 1, S6028: 1, H0687: 1, S0250: 1, H0031: 1, S0364: 1, L0455: 1, H0124: 1, H0591: 1, |
| | | | | H0038: 1, S0450: 1, L0763: 1, L0638: 1, L0637: 1, L0662: 1, L0794: 1, L0649: 1, L0654: 1, L0382: 1, L0792: 1, L3811: 1, L3824: 1, |
| | | | | L3828: 1, H0435: 1, H0518: 1, H0696: 1, H0436: 1, S0432: 1, S0390: 1, S0037: 1, S3014: 1, S0028: 1, S0124: 1, L0751: 1, L0756: 1, |
| | | | | L0779: 1, L0777: 1, L0780: 1, L0752: 1, L0755: 1, S0031: 1, L0599: 1, S0196: 1, H0423: 1, H0422: 1 and H0721: 1. |
| 66 | HOUHI25 | 888279 | 76 | AR219: 18, AR218: 16, AR055: 8, AR104: 6, AR096: 5, AR316: 5, AR039: 5, AR300: 5, AR060: 4, AR277: 4, AR089: 3, AR299: 3, |
| | | | | AR185: 3, AR283: 3, AR282: 2, AR240: 2, AR313: 1, S0436: 7, H0551: 6, L2985: 5, H0599: 5, L0805: 5, L0756: 5, L0758: 5, |
| | | | | L0759: 5, L0754: 4, L0747: 4, L3655: 3, H0545: 3, S0003: 3, L0375: 3, H0144: 3, L0755: 3, S0442: 2, L3649: 2, S0045: 2, L3816: 2, |
| | | | | H0013: 2, L0471: 2, H0373: 2, H0051: 2, H0560: 2, S0422: 2, L0768: 2, L0803: 2, L0650: 2, L0659: 2, L0438: 2, L0439: 2, L0740: 2, |
| | | | | L0750: 2, L0779: 2, L0757: 2, S0242: 2, H0739: 1, H0624: 1, S0040: 1, S0342: 1, S0116: 1, S0212: 1, S0444: 1, H0747: 1, L3280: 1, |
| | | | | H0357: 1, H0587: 1, L0021: 1, S0010: 1, L0105: 1, S0474: 1, H0544: 1, H0046: 1, S0051: 1, H0266: 1, H0622: 1, H0032: 1, H0388: 1, |
| | | | | H0598: 1, H0413: 1, S0438: 1, H0641: 1, S0002: 1, L0770: 1, L3904: 1, L0662: 1, L0776: 1, L0809: 1, L0519: 1, L5622: 1, L5623: 1, |
| | | | | L0663: 1, L0664: 1, L2260: 1, L2381: 1, L2673: 1, L3827: 1, H0520: 1, S0126: 1, L3832: 1, L0753: 1, S0434: 1, L0599: 1, S0011: 1, |
| | | | | H0667: 1, L3560: 1 and L3585: 1. |
| 67 | HPCAL26 | 762822 | 77 | L0659: 11, S0126: 11, L0731: 11, S0192: 11, L0666: 9, L0777: 7, T0049: 5, S0358: 5, L0771: 5, L0757: 5, S0360: 4, S0440: 4, |
| | | | | L0740: 4, L0758: 4, S0212: 3, S0356: 3, S0046: 3, H0369: 3, H0545: 3, L0662: 3, L0774: 3, L0809: 3, H0519: 3, L0752: 3, S0011: 3, |
| | | | | H0295: 2, H0662: 2, S0468: 2, H0012: 2, H0024: 2, H0356: 2, H0616: 2, H0268: 2, H0412: 2, L0646: 2, L0803: 2, S0013: 2, L0754: 2, |
| | | | | L0747: 2, L0759: 2, S0040: 1, S0418: 1, S0442: 1, S0376: 1, H0676: 1, L0717: 1, H0550: 1, S0222: 1, H0574: 1, L0021: 1, H0575: 1, |
| | | | | H0036: 1, H0590: 1, H0618: 1, T0048: 1, H0309: 1, H0596: 1, T0110: 1, H0546: 1, H0046: 1, H0123: 1, H0014: 1, S0003: 1, S0022: 1, |
| | | | | H0428: 1, H0622: 1, H0031: 1, H0673: 1, L0455: 1, H0316: 1, H0598: 1, H0163: 1, H0038: 1, H0433: 1, H0413: 1, T0069: 1, |
| | | | | S0438: 1, H0633: 1, H0647: 1, S0210: 1, L0770: 1, L0769: 1, L0768: 1, L0794: 1, L0519: 1, L0789: 1, L0790: 1, L0664: 1, L0665: 1, |
| | | | | H0144: 1, S0330: 1, S0136: 1, H0696: 1, S3014: 1, S0206: 1, L0751: 1, L0749: 1, L0756: 1, L0779: 1, S0031: 1, S0242: 1, S0194: 1 |
| | | | | and S0276: 1. |
| 68 | HPEBA84 | 753957 | 78 | AR313: 5, AR240: 4, AR299: 4, AR185: 4, AR300: 4, AR060: 4, AR055: 3, AR089: 3, AR096: 2, AR282: 2, AR039: 2, AR218: 2, |
| | | | | AR316: 2, AR277: 1, AR219: 1, AR104: 1, L0591: 2, L3643: 1, S0420: 1, L3388: 1, H0057: 1, H0166: 1, L0648: 1, L0518: 1, |
| | | | | L0809: 1, L0519: 1, L0754: 1 and L0599: 1. |
| 69 | HSAVA08 | 580870 | 79 | AR313: 39, AR039: 39, AR299: 18, AR089: 17, AR096: 17, AR185: 16, AR277: 16, AR300: 16, AR104: 12, AR316: 12, AR240: 10, |
| | | | | AR219: 10, AR218: 9, AR060: 9, AR282: 9, AR055: 8, AR283: 5, S0114: 2 |
| 70 | HSHAX04 | 812178 | 80 | AR299: 18, AR219: 18, AR104: 17, AR218: 17, AR277: 17, AR313: 16, AR316: 15, AR283: 14, AR055: 13, AR096: 13, AR039: 12, |
| | | | | AR240: 12, AR060: 12, AR282: 11, AR089: 11, AR185: 10, AR300: 10, L0731: 6, H0265: 4, L0483: 4, H0424: 4, H0253: 3, |
| | | | | H0318: 3, L0769: 3, L0774: 3, L0776: 3, S0037: 3, L0742: 3, L0750: 3, L0755: 3, S0360: 2, H0581: 2, H0266: 2, H0213: 2, H0124: 2, |
| | | | | H0413: 2, L0766: 2, L0659: 2, L0809: 2, S3014: 2, L0749: 2, L0757: 2, L0758: 2, L0759: 2, L0596: 2, L0595: 2, H0543: 2, H0422: 2, |
| | | | | H0686: 1, H0685: 1, S0040: 1, H0295: 1, H0294: 1, S0430: 1, H0638: 1, S0418: 1, S0420: 1, S0354: 1, S0358: 1, S0376: 1, S0045: 1, |
| | | | | H0586: 1, H0497: 1, H0333: 1, H0486: 1, H0069: 1, H0575: 1, H0618: 1, H0052: 1, H0085: 1, H0009: 1, S0051: 1, H0083: 1, |
| | | | | H0284: 1, H0428: 1, H0417: 1, H0553: 1, H0628: 1, H0038: 1, H0280: 1, H0494: 1, H0625: 1, S0150: 1, S0426: 1, L0667: 1, L0646: 1, |
| | | | | L0764: 1, L0773: 1, L0648: 1, L0767: 1, L0768: 1, L0375: 1, L0806: 1, L0519: 1, L0666: 1, L0663: 1, H0698: 1, H0689: 1, H0539: 1, |
| | | | | H0518: 1, S0027: 1, S0028: 1, L0747: 1, L0752: 1, H0707: 1, L0597: 1, L0581: 1, L0361: 1, H0653: 1, H0542: 1 and H0506: 1. |
| 71 | HSKDR27 | 580874 | 81 | AR055: 9, AR104: 9, AR218: 7, AR060: 7, AR299: 6, AR185: 6, AR039: 6, AR240: 5, AR089: 5, AR219: 5, AR300: 5, AR283: 5, |
| | | | | AR316: 4, AR313: 4, AR096: 3, AR277: 3, AR282: 2, S0027: 95, S0192: 54, S3014: 53, S0126: 42, S0040: 35, H0424: 23, |
| | | | | S0028: 22, S0037: 19, S3012: 16, H0213: 13, T0006: 12, H0250: 11, S0032: 11, L0744: 11, T0040: 10, H0124: 10, H0429: 10, |
| | | | | L0740: 10, L0588: 10, L0754: 9, H0545: 8, H0280: 8, S0194: 8, S0196: 7, H0392: 6, T0039: 6, H0150: 6, H0039: 6, S0206: 6, |
| | | | | L0743: 6, L0731: 6, S0342: 5, S0212: 5, S0045: 5, H0486: 5, H0575: 5, H0014: 5, H0090: 5, H0551: 5, H0100: 5, S0044: 5, S0011: 5, |
| | | | | H0255: 4, H0318: 4, H0271: 4, S0022: 4, H0031: 4, H0181: 4, H0032: 4, H0038: 4, T0067: 4, S0124: 4, L0747: 4, L0749: 4, H0402: 3, |
| | | | | H0309: 3, H0046: 3, S0250: 3, H0068: 3, H0087: 3, H0059: 3, S0142: 3, S0053: 3, H0419: 2, S0116: 2, S0408: 2, S0132: 2, S0278: 2, |
| | | | | S0222: 2, H0331: 2, T0060: 2, H0069: 2, H0427: 2, H0599: 2, T0082: 2, H0253: 2, H0546: 2, H0086: 2, H0123: 2, H0024: 2, |
| | | | | H0015: 2, H0510: 2, H0428: 2, T0023: 2, H0163: 2, H0063: 2, H0509: 2, L0772: 2, L0805: 2, S0052: 2, H0547: 2, H0518: 2, L0748: 2, |
| | | | | L0751: 2, L0745: 2, L0750: 2, L0777: 2, L0755: 2, L0757: 2, H0445: 2, L0590: 2, L0599: 2, S0026: 2, S0242: 2, H0171: 1, H0265: 1, |
| | | | | H0716: 1, H0294: 1, S0298: 1, H0662: 1, H0450: 1, S0360: 1, H0329: 1, S0046: 1, H0411: 1, S6022: 1, H0431: 1, H0357: 1, H0455: 1, |
| | | | | H0586: 1, H0587: 1, L0021: 1, H0042: 1, T0048: 1, H0505: 1, H0052: 1, H0251: 1, H0235: 1, H0231: 1, H0544: 1, H0050: 1, |
| | | | | H0051: 1, H0071: 1, H0083: 1, H0060: 1, H0266: 1, H0188: 1, H0292: 1, S0214: 1, H0328: 1, H0033: 1, H0417: 1, H0553: 1, |
| | | | | H0628: 1, H0617: 1, H0606: 1, H0383: 1, H0212: 1, H0388: 1, H0135: 1, H0040: 1, H0487: 1, H0413: 1, T0069: 1, H0560: 1, |
| | | | | H0538: 1, S0210: 1, L0763: 1, L0646: 1, L0641: 1, L0649: 1, L0803: 1, L0652: 1, L0629: 1, L0659: 1, L0787: 1, L0665: 1, H0435: 1, H0528: 1, H0521: 1, |
| | | | | H0555: 1, L0779: 1, L0581: 1, S0276: 1 and H0008: 1. |
| 72 | HSQBF66 | 560726 | 82 | AR313: 16, AR039: 13, AR089: 11, AR299: 10, AR185: 9, AR277: 8, AR055: 8, AR060: 8, AR240: 8, AR096: 8, AR300: 8, |
| | | | | AR104: 7, AR316: 7, AR282: 7, AR218: 6, AR283: 5, AR219: 3, S0026: 1 |
| 73 | HSRFD18 | 840771 | 83 | AR055: 2, AR039: 1, L0754: 10, S0422: 5, S0022: 4, L0803: 4, L0748: 4, L0747: 4, L0591: 4, H0486: 3, L0766: 3, L0805: 3, |
| | | | | L0526: 3, L0665: 3, S0434: 3, S0212: 2, S0444: 2, S0360: 2, S0222: 2, L3816: 2, H0013: 2, H0596: 2, L0471: 2, H0166: 2, H0591: 2, |
| | | | | H0509: 2, L0646: 2, L0662: 2, L0659: 2, L0666: 2, L0664: 2, S0374: 2, L0779: 2, L0777: 2, L0759: 2, S0436: 2, H0624: 1, H0170: 1, |
| | | | | S0114: 1, S0001: 1, H0671: 1, H0663: 1, H0402: 1, H0305: 1, S0442: 1, S0408: 1, H0329: 1, H0742: 1, L3387: 1, H0581: 1, H0421: 1, |
| | | | | H0194: 1, H0263: 1, H0597: 1, H0569: 1, H0355: 1, H0510: 1, H0179: 1, H0687: 1, H0615: 1, L0483: 1, H0553: 1, H0644: 1, |
| | | | | H0673: 1, H0674: 1, H0100: 1, S0450: 1, H0714: 1, L0763: 1, L0770: 1, L0761: 1, L0649: 1, L0776: 1, L0518: 1, L0790: 1, L0791: 1, |
| | | | | L0792: 1, L0663: 1, H0547: 1, H0670: 1, H0521: 1, H0696: 1, S0406: 1, H0555: 1, H0478: 1, L0780: 1, H0707: 1, S0276: 1 and |
| | | | | H0543: 1. |
| 74 | HSWBE76 | 751308 | 84 | AR277: 11, AR282: 11, AR283: 10, AR219: 8, AR218: 8, AR104: 7, AR060: 7, AR240: 6, AR316: 6, AR299: 6, AR185: 6, |
| | | | | AR300: 5, AR089: 5, AR039: 5, AR055: 5, AR096: 5, AR313: 4, L0777: 4, L0751: 3, L0747: 3, L0648: 2, L0779: 2, L0753: 2, |
| | | | | S0342: 1, H0484: 1, H0661: 1, S0358: 1, L0009: 1, H0411: 1, S6014: 1, H0546: 1, H0123: 1, H0188: 1, S0366: 1, H0413: 1, S0344: 1, |
| | | | | H0529: 1, L0769: 1, L0627: 1, L0774: 1, L0378: 1, L0776: 1, L0655: 1, L0663: 1, S0380: 1, H0478: 1, L0743: 1, L0750: 1 and |
| | | | | S0196: 1. |
| 75 | HT3BF49 | 838620 | 85 | H0271: 2, L0791: 2, L0439: 2, H0159: 1, H0561: 1, L0774: 1, S0052: 1 and L0779: 1. |
| 76 | HTEEW69 | 764835 | 86 | AR104: 36, AR283: 28, AR219: 27, AR218: 27, AR316: 21, AR277: 20, AR089: 20, AR055: 19, AR096: 18, AR313: 18, AR240: 18, |
| | | | | AR282: 18, AR185: 16, AR299: 16, AR060: 15, AR039: 14, AR300: 12, H0038: 8, H0616: 4, L0779: 3, L0758: 3, L0753: 2, |
| | | | | L0032: 1, T0006: 1, H0040: 1, L0768: 1 and H0547: 1. |
| 77 | HTEHU59 | 840385 | 87 | AR313: 11, AR218: 10, AR219: 9, AR039: 7, AR316: 6, AR096: 6, AR104: 6, AR277: 5, AR299: 5, AR055: 5, AR282: 4, AR089: 4, |
| | | | | AR283: 3, AR300: 3, AR060: 3, AR240: 3, AR185: 3, S0422: 6, H0038: 4, L0758: 4, L0754: 3, S0360: 2, H0024: 2, L0598: 2, |
| | | | | L0766: 2, L0748: 2, L0747: 2, L0756: 2, H0583: 1, H0341: 1, S0418: 1, L0005: 1, H0741: 1, H0437: 1, H0369: 1, H0581: 1, H0194: 1, |
| | | | | S0050: 1, H0271: 1, H0428: 1, T0006: 1, H0068: 1, H0412: 1, H0056: 1, H0494: 1, S0426: 1, L0772: 1, L0646: 1, L0662: 1, L0803: 1, |
| | | | | L0806: 1, L0776: 1, L0655: 1, L0789: 1, L0792: 1, H0144: 1, S0374: 1, H0670: 1, H0627: 1, S0026: 1 and S0192: 1. |
| 78 | HTEMQ17 | 840387 | 88 | AR282: 6, AR055: 6, AR060: 5, AR218: 4, AR283: 4, AR300: 3, AR299: 3, AR316: 3, AR039: 3, AR185: 3, AR104: 2, AR089: 2, |
| | | | | AR219: 2, AR313: 2, AR096: 2, AR240: 1, L0748: 6, L0766: 4, H0038: 3, H0616: 3, H0056: 2, H0529: 2, H0519: 2, H0624: 1, |
| | | | | H0662: 1, S0418: 1, S0360: 1, H0749: 1, H0013: 1, H0581: 1, S0388: 1, H0266: 1, H0591: 1, H0087: 1, H0413: 1, H0561: 1, S0438: 1, |
| | | | | S0422: 1, L0520: 1, L0769: 1, L0794: 1, L0775: 1, L0666: 1, L0663: 1, H0547: 1, S0152: 1, L0740: 1, L0777: 1, L0753: 1, L0758: 1, |
| | | | | L0608: 1 and H0542: 1. |
| 79 | HTGBK95 | 834490 | 89 | AR277: 83, AR313: 74, AR219: 72, AR283: 69, AR316: 57, AR039: 49, AR218: 49, AR089: 48, AR299: 46, AR282: 42, AR104: 42, |
| | | | | AR096: 42, AR185: 40, AR240: 39, AR055: 37, AR300: 32, AR060: 32, L0777: 5, S0444: 3, L0766: 3, L0803: 3, L0439: 3, |
| | | | | S0360: 2, L0598: 2, L0666: 2, L0748: 2, T0049: 1, S0134: 1, S0116: 1, S0408: 1, L0717: 1, H0586: 1, H0486: 1, H0575: 1, H0510: 1, |
| | | | | H0553: 1, H0560: 1, S0422: 1, L0763: 1, L0769: 1, L0521: 1, L0767: 1, L0768: 1, L0775: 1, L0663: 1, S0374: 1, L0438: 1, H0520: 1, |
| | | | | H0682: 1, S0328: 1, S0406: 1, L0740: 1, S0192: 1 and H0543: 1. |
| 80 | HTLEM16 | 779133 | 90 | AR104: 96, AR219: 74, AR277: 67, AR283: 59, AR218: 52, AR185: 51, AR089: 49, AR316: 46, AR096: 44, AR240: 44, AR313: 42, |
| | | | | AR055: 40, AR299: 37, AR282: 37, AR060: 33, AR039: 33, AR300: 24, L0439: 31, L0741: 24, H0056: 13, L0748: 12, H0052: 9, |
| | | | | H0521: 9, L0776: 8, L0744: 8, L0438: 7, L0754: 7, S0474: 6, L0766: 6, L0742: 6, L0731: 6, L0750: 5, S0278: 4, L5566: 4, L0665: 4, |
| | | | | H0522: 4, H0556: 3, H0716: 3, H0657: 3, S0358: 3, H0580: 3, H0599: 3, S0049: 3, H0009: 3, H0553: 3, H0641: 3, S0142: 3, L0764: 3, |
| | | | | L0659: 3, L0666: 3, S0126: 3, L0751: 3, H0717: 2, H0656: 2, S0029: 2, S0420: 2, S0360: 2, S0007: 2, H0497: 2, H0486: 2, H0618: 2, |
| | | | | H0253: 2, H0581: 2, H0046: 2, S0388: 2, T0010: 2, H0039: 2, H0424: 2, L0456: 2, S0036: 2, H0135: 2, H0551: 2, H0623: 2, H0494: 2, |
| | | | | S0002: 2, L0770: 2, L0796: 2, L5575: 2, L5565: 2, L0761: 2, L0662: 2, L0650: 2, L0383: 2, L0663: 2, H0682: 2, L0758: 2, S0434: 2, |
| | | | | L0596: 2, L0581: 2, S0242: 2, S0114: 1, H0583: 1, L0422: 1, S0116: 1, H0662: 1, H0305: 1, S0418: 1, L0005: 1, S0444: 1, S0046: 1, |
| | | | | S0476: 1, H0645: 1, H0437: 1, H0261: 1, H0392: 1, H0600: 1, H0586: 1, H0574: 1, L0623: 1, H0013: 1, H0250: 1, H0427: 1, |
| | | | | H0002: 1, H0575: 1, T0082: 1, H0590: 1, S0010: 1, H0390: 1, T0048: 1, H0318: 1, H0421: 1, H0251: 1, H0232: 1, H0546: 1, |
| | | | | H0150: 1, H0041: 1, H0178: 1, H0569: 1, H0620: 1, H0051: 1, S0051: 1, H0510: 1, H0416: 1, H0188: 1, S0312: 1, S0314: 1, |
| | | | | H0622: 1, H0213: 1, H0031: 1, L0143: 1, H0032: 1, L0455: 1, S0366: 1, H0038: 1, H0087: 1, H0264: 1, H0268: 1, H0022: 1, |
| | | | | H0560: 1, H0625: 1, H0561: 1, S0438: 1, H0509: 1, H0633: 1, H0649: 1, S0144: 1, S0208: 1, H0529: 1, L0769: 1, L0637: 1, L0667: 1, |
| | | | | L5568: 1, L0774: 1, L0375: 1, L0805: 1, L0653: 1, L0654: 1, L0661: 1, L0807: 1, L0527: 1, L0382: 1, L0809: 1, L0793: 1, S0006: 1, |
| | | | | S0428: 1, S0053: 1, S0310: 1, L0352: 1, H0547: 1, H0684: 1, H0670: 1, H0660: 1, S0152: 1, H0696: 1, S0406: 1, H0555: 1, H0436: 1, |
| | | | | S3014: 1, L0743: 1, L0745: 1, L0747: 1, L0749: 1, L0756: 1, L0753: 1, L0755: 1, H0445: 1, S0436: 1, L0485: 1, H0667: 1, H0216: 1, |
| | | | | H0543: 1, H0422: 1 and H0008: 1. |
| 81 | HTNBK13 | 831967 | 91 | L0779: 5, L0731: 4, L0593: 4, H0046: 3, L0776: 3, L0666: 3, H0031: 2, L0772: 2, L0774: 2, L0805: 2, H0670: 2, L0439: 2, L0754: 2, |
| | | | | L0777: 2, L0758: 2, L0590: 2, T0002: 1, L0717: 1, H0632: 1, L0622: 1, T0082: 1, H0581: 1, H0263: 1, T0115: 1, H0597: 1, L0471: 1, |
| | | | | H0012: 1, H0620: 1, H0163: 1, T0067: 1, L0770: 1, L0637: 1, L0388: 1, L0657: 1, L0382: 1, L0664: 1, S0126: 1, H0660: 1, S0378: 1, |
| | | | | H0521: 1, L0747: 1, L0750: 1, L0756: 1, L0752: 1, L0755: 1, L0759: 1, S0031: 1, L0599: 1 and L0603: 1. |
| 82 | HTODN35 | 570901 | 92 | AR104: 20, AR185: 11, AR055: 11, AR060: 10, AR089: 10, AR299: 10, AR240: 9, AR277: 8, AR282: 8, AR313: 7, AR300: 7, |
| | | | | AR316: 7, AR283: 5, AR096: 5, AR218: 4, AR219: 4, AR039: 3, H0264: 1 |
| 83 | HTPDU17 | 840596 | 93 | AR039: 5, AR277: 4, AR300: 4, AR282: 3, AR316: 3, AR096: 3, AR218: 3, AR299: 3, AR060: 2, AR055: 2, AR283: 2, AR185: 2, |
| | | | | AR104: 2, AR313: 2, AR089: 1, AR240: 1, H0677: 19, L0759: 6, L0748: 5, H0040: 4, L0438: 3, L0754: 3, L0750: 3, L0777: 3, |
| | | | | H0255: 2, H0617: 2, H0038: 2, H0529: 2, L0769: 2, L0761: 2, L0662: 2, L0666: 2, S0406: 2, L0749: 2, L0758: 2, L0595: 2, H0265: 1, |
| | | | | H0556: 1, H0717: 1, S0134: 1, H0650: 1, H0657: 1, S0358: 1, S0444: 1, S0410: 1, S0045: 1, H0411: 1, H0392: 1, L0468: 1, H0587: 1, |
| | | | | H0013: 1, H0069: 1, H0635: 1, H0575: 1, H0618: 1, H0581: 1, H0564: 1, H0569: 1, S6028: 1, H0266: 1, H0252: 1, H0615: 1, |
| | | | | H0039: 1, H0031: 1, H0634: 1, H0100: 1, H0494: 1, H0334: 1, H0561: 1, S0150: 1, S0422: 1, L0667: 1, L0646: 1, L0800: 1, L0771: 1, |
| | | | | L0661: 1, L0809: 1, L0790: 1, L0792: 1, L0663: 1, L0665: 1, S0374: 1, H0547: 1, H0519: 1, H0593: 1, H0672: 1, H0518: 1, H0521: 1, |
| | | | | H0555: 1, H0436: 1, L0439: 1, L0779: 1, L0731: 1 and L0757: 1. |
| 84 | HTTDN24 | 766485 | 94 | AR218: 21, AR219: 20, AR089: 15, AR300: 14, AR316: 14, AR185: 13, AR313: 13, AR277: 13, AR282: 13, AR039: 12, AR299: 11, |
| | | | | AR096: 11, AR055: 10, AR104: 8, AR240: 7, AR060: 7, AR283: 6 |
| 85 | HTTEE41 | 840950 | 95 | AR219: 84, AR218: 59, AR316: 43, AR313: 32, AR104: 24, AR089: 24, AR185: 24, AR039: 23, AR096: 23, AR299: 21, AR055: 20, |
| | | | | AR060: 17, AR282: 14, AR300: 14, AR283: 11, AR240: 11, AR277: 10, H0040: 17, H0251: 14, L0758: 10, L0748: 8, L0731: 8, |
| | | | | H0494: 7, L0666: 7, H0144: 7, H0659: 7, L0747: 7, L0749: 7, L0757: 7, H0038: 6, H0529: 6, L0770: 6, L0662: 6, L0659: 6, H0013: 5, |
| | | | | H0318: 5, H0616: 5, S0440: 5, L0775: 5, L0776: 5, H0519: 5, L0588: 5, L0592: 5, H0341: 4, S0360: 4, H0412: 4, L0663: 4, H0547: 4, |
| | | | | L0754: 4, L0595: 4, H0542: 4, H0543: 4, H0423: 4, H0171: 3, H0657: 3, H0656: 3, S0045: 3, L3388: 3, H0581: 3, S0049: 3, T0110: 3, |
| | | | | H0046: 3, H0090: 3, H0591: 3, H0551: 3, H0100: 3, H0022: 3, H0625: 3, H0633: 3, S0422: 3, L0375: 3, L0664: 3, H0682: 3, S0406: 3, |
| | | | | L0740: 3, H0556: 2, H0241: 2, H0638: 2, S0418: 2, L0005: 2, S0442: 2, S0376: 2, H0722: 2, H0393: 2, L0717: 2, S0222: 2, H0574: 2, |
| | | | | H0486: 2, T0040: 2, L0471: 2, S0051: 2, S0003: 2, H0252: 2, L0483: 2, T0006: 2, H0031: 2, H0032: 2, H0124: 2, H0634: 2, H0264: 2, |
| | | | | T0042: 2, S0150: 2, H0646: 2, L0763: 2, L0637: 2, L0646: 2, L0374: 2, L0764: 2, L0768: 2, L0653: 2, L0665: 2, H0593: 2, H0435: 2, |
| | | | | H0658: 2, H0539: 2, S0152: 2, L3832: 2, H0521: 2, S3014: 2, S0027: 2, S0028: 2, L0439: 2, L0750: 2, L0777: 2, S0436: 2, L0596: 2, |
| | | | | L0608: 2, L0604: 2, L0594: 2, L0362: 2, S0026: 2, H0667: 2, S0452: 2, H0506: 2, L0411: 1, H0624: 1, H0170: 1, H0395: 1, H0265: 1, |
| | | | | T0002: 1, H0220: 1, H0140: 1, H0159: 1, H0686: 1, H0583: 1, H0650: 1, S0212: 1, H0484: 1, H0664: 1, L0481: 1, S0356: 1, S0354: 1, |
| | | | | S0358: 1, S0444: 1, S0408: 1, L3649: 1, H0580: 1, H0747: 1, H0437: 1, H0431: 1, T0104: 1, H0600: 1, H0592: 1, H0586: 1, L3817: 1, |
| | | | | H0642: 1, H0632: 1, L2482: 1, T0114: 1, H0244: 1, H0250: 1, H0069: 1, H0156: 1, L0021: 1, H0599: 1, H0036: 1, S0346: 1, |
| | | | | H0596: 1, H0544: 1, H0009: 1, N0006: 1, L0157: 1, H0569: 1, H0123: 1, H0242: 1, H0024: 1, H0083: 1, H0375: 1, H0328: 1, |
| | | | | H0615: 1, H0428: 1, H0039: 1, H0622: 1, H0213: 1, H0553: 1, L0142: 1, H0628: 1, H0674: 1, H0388: 1, L0456: 1, H0708: 1, |
| | | | | H0068: 1, H0598: 1, S0036: 1, H0135: 1, H0087: 1, H0380: 1, H0413: 1, H0056: 1, L0351: 1, T0041: 1, H0334: 1, H0561: 1, |
| | | | | H0366: 1, S0448: 1, S0294: 1, H0130: 1, H0641: 1, H0649: 1, S0208: 1, S0002: 1, S0426: 1, L0520: 1, L0631: 1, L0769: 1, L0638: 1, |
| | | | | L5565: 1, L0667: 1, L0772: 1, L0372: 1, L0641: 1, L0626: 1, L0794: 1, L0766: 1, L0381: 1, L0650: 1, L0651: 1, L0806: 1, L0655: 1, |
| | | | | L0807: 1, L0657: 1, L0636: 1, L0518: 1, L0782: 1, L0382: 1, L0809: 1, L3391: 1, L2263: 1, L2259: 1, L2262: 1, L0565: 1, H0693: 1, |
| | | | | L3827: 1, H0520: 1, S0126: 1, H0689: 1, H0670: 1, H0660: 1, H0666: 1, H0648: 1, L0602: 1, H0710: 1, H0518: 1, S0176: 1, H0134: 1, |
| | | | | H0555: 1, H0436: 1, H0478: 1, H0631: 1, L0779: 1, L0752: 1, S0434: 1, L0605: 1, L0591: 1, L0599: 1, H0665: 1, S0196: 1, L2368: 1, |
| | | | | H0008: 1 and H0352: 1. |
| 86 | HTXJD85 | 840391 | 96 | AR313: 38, AR039: 32, AR096: 17, AR185: 17, AR300: 17, AR277: 16, AR299: 15, AR089: 15, AR240: 12, AR316: 10, AR219: 10, |
| | | | | AR104: 9, AR060: 8, AR055: 8, AR218: 8, AR282: 6, AR283: 4, H0556: 2, L0638: 1, L0748: 1 and L0439: 1. |
| 87 | HUVDJ48 | 564853 | 97 | AR055: 6, AR060: 5, AR283: 5, AR039: 5, AR185: 4, AR096: 4, AR240: 4, AR104: 4, AR299: 4, AR300: 3, AR089: 3, AR316: 3, |
| | | | | AR313: 3, AR282: 3, AR218: 2, AR277: 2, AR219: 2, H0393: 1, H0056: 1 and L0662: 1. |
| 88 | HWBBU75 | 780360 | 98 | L0665: 4, H0457: 3, H0264: 3, L0766: 3, H0521: 3, L0745: 3, H0556: 2, H0580: 2, S0352: 2, L0761: 2, L0806: 2, L0789: 2, |
| | | | | L0748: 2, H0542: 2, H0255: 1, S0278: 1, H0581: 1, H0271: 1, H0719: 1, H0413: 1, H0494: 1, S0002: 1, S0426: 1, L0769: 1, L0774: 1, |
| | | | | H0660: 1, L0750: 1, L0752: 1, L0753: 1 and S0424: 1. |
| 89 | HWHPB78 | 740778 | 99 | H0437: 2, L0769: 2, S0028: 2, L0439: 2, S0436: 2, H0556: 1, H0125: 1, S0420: 1, H0619: 1, H0587: 1, H0635: 1, H0253: 1, |
| | | | | H0318: 1, H0744: 1, H0052: 1, H0009: 1, H0172: 1, H0266: 1, H0135: 1, H0494: 1, L3905: 1, L0438: 1, L3828: 1, H0547: 1, H0539: 1, H0521: 1, |
| | | | | S0037: 1, L0593: 1, H0506: 1 and H0008: 1. |
| 90 | HWLBO67 | 834315 | 100 | S0374: 1 |
| 91 | HWLGP26 | 834770 | 101 | AR313: 10, AR039: 7, AR096: 6, AR316: 5, AR299: 4, AR240: 4, AR300: 3, AR277: 3, AR089: 3, AR060: 2, AR185: 2, AR282: 2, |
| | | | | AR055: 2, AR218: 1, AR283: 1, L0766: 5, L0803: 5, L0794: 3, S0410: 2, H0551: 2, H0435: 2, L0756: 2, L0731: 2, H0585: 1, |
| | | | | S0212: 1, S0282: 1, L0534: 1, S0442: 1, S0354: 1, H0735: 1, H0486: 1, H0014: 1, H0354: 1, H0644: 1, H0135: 1, H0647: 1, L0369: 1, |
| | | | | L0640: 1, L0763: 1, L0770: 1, L3905: 1, L0646: 1, L0771: 1, L0804: 1, L0784: 1, L0528: 1, L0789: 1, L0790: 1, L0792: 1, L3827: 1, |
| | | | | H0658: 1, L0749: 1, L0758: 1 and S0436: 1. |
| 92 | HILCA24 | 869856 | 102 | AR316: 4, AR282: 2, AR096: 1, AR299: 1, AR039: 1, L0748: 4, H0090: 2, L0659: 2, H0521: 2, L0777: 2, L0608: 2, H0543: 2, |
| | | | | T0002: 1, S0114: 1, L3658: 1, S0358: 1, S0408: 1, L3649: 1, T0109: 1, H0581: 1, H0622: 1, H0031: 1, H0644: 1, S0002: 1, L0657: 1, |
| | | | | L0526: 1, L0789: 1, L0664: 1, S0380: 1, H0522: 1, L0749: 1 and L0779: 1. |
| 93 | HE2CA60 | 888705 | 103 | AR313: 86, AR299: 44, AR277: 42, AR283: 37, AR039: 37, AR316: 36, AR218: 34, AR096: 34, AR219: 34, AR089: 32, AR185: 32, |
| | | | | AR104: 30, AR282: 23, AR300: 23, AR055: 22, AR060: 16, AR240: 16 |
| | | | | H0305: 16, L0777: 11, L0471: 10, S0422: 9, L0766: 9, H0624: 8, H0013: 7, H0170: 6, L2551: 6, H0046: 6, L0665: 6, L0598: 5, |
| | | | | L0662: 5, L0776: 5, H0547: 5, L0758: 5, L0589: 5, H0171: 4, L0659: 4, L0666: 4, L0663: 4, L0756: 4, L0731: 4, S0358: 3, L2744: 3, |
| | | | | L3655: 3, H0581: 3, H0457: 3, S0406: 3, L0744: 3, L0439: 3, L0752: 3, S0436: 3, H0542: 3, H0543: 3, L3643: 2, H0650: 2, H0657: 2, |
| | | | | S0116: 2, S0442: 2, S0354: 2, L0717: 2, S0414: 2, H0486: 2, T0040: 2, H0318: 2, H0421: 2, H0428: 2, H0553: 2, H0090: 2, H0040: 2, |
| | | | | H0063: 2, H0641: 2, L0769: 2, L0761: 2, L0764: 2, L0650: 2, L0774: 2, L0805: 2, L0657: 2, H0144: 2, L3811: 2, L3832: 2, H0521: 2, |
| | | | | S0404: 2, L0741: 2, L0740: 2, L0747: 2, L0759: 2, S0434: 2, L0362: 2, H0685: 1, S0218: 1, L0785: 1, H0341: 1, H0255: 1, H0663: 1, |
| | | | | H0662: 1, H0402: 1, S0376: 1, S0360: 1, S0410: 1, L3645: 1, L3646: 1, H0637: 1, H0741: 1, H0722: 1, H0735: 1, S0046: 1, H0749: 1, |
| | | | | S0300: 1, L2758: 1, L2767: 1, L3388: 1, S0222: 1, H0592: 1, H0586: 1, H0587: 1, H0559: 1, L3653: 1, H0427: 1, L0021: 1, H0037: 1, |
| | | | | H0746: 1, H0263: 1, H0544: 1, H0050: 1, H0057: 1, L0163: 1, H0051: 1, S0022: 1, H0328: 1, T0023: 1, H0673: 1, H0674: 1, |
| | | | | H0591: 1, H0038: 1, H0551: 1, T0067: 1, H0100: 1, L0065: 1, S0440: 1, H0649: 1, H0529: 1, L0369: 1, L0763: 1, L0667: 1, L0630: 1, |
| | | | | L0372: 1, L0521: 1, L0533: 1, L0775: 1, L0651: 1, L0806: 1, L0655: 1, L0661: 1, L0807: 1, L0656: 1, L0809: 1, L3872: 1, L0790: 1, |
| | | | | L0664: 1, L2655: 1, L3663: 1, S0374: 1, L2706: 1, H0520: 1, H0435: 1, H0660: 1, H0672: 1, S0328: 1, H0539: 1, S0380: 1, H0753: 1, |
| | | | | S0004: 1, H0696: 1, L0748: 1, L0754: 1, L0750: 1, L0753: 1, S0031: 1, H0444: 1, L0588: 1, L0605: 1, L0485: 1, H0216: 1, S0242: 1, |
| | | | | H0423: 1, S0458: 1 and H0721: 1. |
| 94 | HPWTF23 | 844775 | 104 | AR240: 84, AR089: 51, AR299: 38, AR096: 37, AR039: 36, AR313: 34, AR185: 24, AR300: 22, AR316: 22, AR282: 19, AR283: 15, |
| | | | | AR104: 14, AR055: 10, AR060: 10, AR277: 6, AR218: 2 |
| | | | | S0474: 47, H0710: 28, L0747: 18, L0659: 17, H0656: 13, H0436: 10, H0271: 9, L0751: 9, H0581: 8, H0179: 8, H0063: 8, L0731: 8, |
| | | | | L0599: 8, H0740: 7, L0756: 7, H0650: 6, L0662: 6, H0555: 6, S0354: 5, H0728: 5, H0733: 5, H0734: 5, H0036: 5, H0590: 5, |
| | | | | H0052: 5, L0770: 5, S0428: 5, S0374: 5, L0439: 5, L3643: 4, H0717: 4, H0747: 4, H0393: 4, S0222: 4, H0156: 4, H0309: 4, S0312: 4, |
| | | | | S0314: 4, H0090: 4, H0591: 4, L0637: 4, L0761: 4, L0776: 4, L0783: 4, L0438: 4, L0757: 4, H0543: 4, H0716: 3, H0662: 3, H0402: 3, |
| | | | | H0619: 3, H0392: 3, H0575: 3, H0004: 3, H0673: 3, S0364: 3, H0135: 3, H0059: 3, H0494: 3, L0667: 3, L0764: 3, L0803: 3, L0775: 3, |
| | | | | L0666: 3, L3811: 3, H0670: 3, L0744: 3, L0750: 3, L0779: 3, L0758: 3, L0759: 3, S0436: 3, H0556: 2, L3644: 2, H0713: 2, S6024: 2, |
| | | | | H0341: 2, S0282: 2, S0442: 2, S0376: 2, S0360: 2, H0580: 2, H0329: 2, H0749: 2, H0645: 2, H0369: 2, H0486: 2, S0280: 2, H0042: 2, |
| | | | | H0421: 2, H0545: 2, H0457: 2, H0620: 2, H0014: 2, S0051: 2, T0010: 2, S0340: 2, H0031: 2, H0644: 2, H0383: 2, H0674: 2, |
| | | | | H0551: 2, H0264: 2, H0488: 2, T0004: 2, S0438: 2, H0130: 2, H0647: 2, S0422: 2, L0766: 2, L0655: 2, L0517: 2, L0518: 2, L0809: 2, |
| | | | | L0647: 2, H0547: 2, H0660: 2, S0044: 2, S0027: 2, S0028: 2, L0748: 2, L0754: 2, L0745: 2, H0445: 2, S0434: 2, L0596: 2, L0588: 2, |
| | | | | H0506: 2, H0170: 1, S0134: 1, L0414: 1, L0785: 1, S0212: 1, H0255: 1, S0358: 1, S0444: 1, L3649: 1, H0637: 1, H0729: 1, H0730: 1, |
| | | | | H0741: 1, H0208: 1, S6022: 1, H0550: 1, H0609: 1, H0586: 1, H0333: 1, T0060: 1, H0427: 1, L0021: 1, L0022: 1, S0010: 1, S0346: 1, |
| | | | | L0105: 1, H0318: 1, H0597: 1, H0150: 1, L0471: 1, H0011: 1, S0362: 1, H0373: 1, S0388: 1, H0354: 1, H0099: 1, H0594: 1, H0266: 1, |
| | | | | H0416: 1, H0188: 1, S0318: 1, S0334: 1, H0687: 1, S0338: 1, H0252: 1, H0213: 1, H0553: 1, H0111: 1, H0617: 1, H0169: 1, |
| | | | | H0163: 1, T0067: 1, L0435: 1, L0564: 1, S0440: 1, H0509: 1, S0150: 1, H0646: 1, H0652: 1, L3815: 1, L0371: 1, L0769: 1, L0771: 1, |
| | | | | L0649: 1, L0774: 1, L0375: 1, L0651: 1, L0378: 1, L0805: 1, L0606: 1, L0657: 1, L0384: 1, L0529: 1, L5623: 1, L0793: 1, L0664: 1, |
| | | | | S0216: 1, H0144: 1, H0723: 1, H0593: 1, H0689: 1, H0659: 1, H0672: 1, S0328: 1, H0539: 1, H0518: 1, H0521: 1, H0696: 1, |
| | | | | H0134: 1, L0612: 1, H0732: 1, S3012: 1, S0390: 1, S0037: 1, S3014: 1, S0032: 1, L0743: 1, L0749: 1, L0752: 1, L0755: 1, H0707: 1, |
| | | | | L0591: 1, L0592: 1, H0653: 1, H0136: 1, S0412: 1 and H0721: 1. |
| 95 | HGCAC19 | 851527 | 105 | AR219: 2, AR316: 2, AR096: 1 |
| | | | | L0794: 15, L0803: 12, L0766: 7, H0013: 6, H0090: 6, L0663: 6, L0777: 6, L0731: 6, L0759: 6, H0457: 5, H0328: 5, L0493: 5, |
| | | | | L0666: 5, L0754: 5, L0749: 5, H0543: 5, H0656: 4, S0358: 4, H0615: 4, L0665: 4, H0521: 4, L0779: 4, L0588: 4, H0305: 3, S0360: 3, |
| | | | | H0036: 3, H0052: 3, T0042: 3, L0761: 3, L0805: 3, L0809: 3, H0144: 3, H0670: 3, H0696: 3, L0591: 3, S0134: 2, H0657: 2, L3659: 2, |
| | | | | S0418: 2, S0442: 2, S0007: 2, S0045: 2, L0717: 2, H0600: 2, H0486: 2, H0156: 2, H0575: 2, H0590: 2, H0024: 2, S0022: 2, L0483: 2, |
| | | | | H0135: 2, H0038: 2, H0560: 2, S0422: 2, L0457: 2, H0529: 2, L0625: 2, L0648: 2, L0776: 2, L0655: 2, L0527: 2, S0374: 2, H0520: 2, |
| | | | | H0519: 2, H0659: 2, H0436: 2, L0748: 2, L0745: 2, L0581: 2, L0361: 2, H0542: 2, H0423: 2, S0424: 2, H0624: 1, H0171: 1, H0556: 1, |
| | | | | T0002: 1, H0686: 1, S0342: 1, H0717: 1, T0049: 1, S0430: 1, H0650: 1, H0341: 1, H0663: 1, H0589: 1, S0356: 1, S0376: 1, S0408: 1, |
| | | | | S0410: 1, L2336: 1, H0329: 1, S0046: 1, H0645: 1, H0369: 1, S6014: 1, H0370: 1, H0455: 1, H0438: 1, H0602: 1, H0586: 1, H0587: 1, |
| | | | | H0574: 1, H0559: 1, S0280: 1, L0021: 1, H0318: 1, S0474: 1, H0263: 1, T0115: 1, H0545: 1, L0157: 1, H0123: 1, L0471: 1, H0015: 1, |
| | | | | S0388: 1, S0051: 1, H0375: 1, H0271: 1, H0188: 1, S0312: 1, S0003: 1, H0688: 1, H0039: 1, H0622: 1, H0031: 1, H0644: 1, L0055: 1, |
| | | | | H0169: 1, L0456: 1, H0163: 1, H0634: 1, H0551: 1, H0379: 1, H0488: 1, H0279: 1, L0475: 1, S0352: 1, H0652: 1, S0208: 1, L0640: 1, |
| | | | | L0763: 1, L0500: 1, L0769: 1, L0646: 1, L0662: 1, L0649: 1, L0498: 1, L0804: 1, L0650: 1, L0784: 1, L0806: 1, L0653: 1, L0606: 1, |
| | | | | L0515: 1, L0659: 1, L0526: 1, L0519: 1, L0788: 1, L0790: 1, L0791: 1, L0664: 1, S0053: 1, S0296: 1, H0547: 1, S0126: 1, H0682: 1, |
| | | | | H0684: 1, H0658: 1, H0660: 1, H0672: 1, S0380: 1, H0518: 1, H0525: 1, S0044: 1, S0404: 1, S0406: 1, H0479: 1, S0432: 1, S3014: 1, |
| | | | | L0744: 1, L0750: 1, L0780: 1, L0753: 1, L0604: 1, S0106: 1, S0242: 1, S0196: 1, S0452: 1 and H0506: 1. |
| 96 | HEQBJ01 | 876546 | 106 | AR277: 12, AR283: 11, AR219: 11, AR316: 10, AR089: 10, AR218: 9, AR104: 9, AR055: 8, AR282: 8, AR313: 8, AR096: 7, |
| | | | | AR300: 7, AR185: 7, AR299: 7, AR240: 7, AR060: 5, AR039: 5 |
| | | | | S0360: 3, H0619: 3, H0673: 2, L0438: 2, H0685: 1, S0444: 1, H0544: 1, H0266: 1, H0163: 1, L0770: 1, L0646: 1, L0768: 1, |
| | | | | L0766: 1, L0803: 1, L0776: 1, S0152: 1, S0027: 1, L0439: 1, L0747: 1, L0777: 1, L0752: 1 and L0758: 1. |
| 97 | HBJHT01 | 587262 | 107 | AR313: 10, AR039: 8, AR299: 6, AR300: 5, AR185: 5, AR055: 5, AR277: 5, AR060: 4, AR096: 4, AR089: 4, AR316: 4, AR240: 3, |
| | | | | AR104: 3, AR282: 2, AR218: 2, AR283: 2 |
| | | | | L0667: 2, S0114: 1, H0351: 1, H0318: 1, H0615: 1 and L0764: 1.TZ,1/88 |

[0093] Table 1C summarizes additional polynucleotides encompassed by the invention (including cDNA clones related to the sequences (Clone ID:), contig sequences (contig identifier (Contig ID:) contig nucleotide sequence identifiers (SEQ ID NO:X)), and genomic sequences (SEQ ID NO:B). The first column provides a unique clone identifier, “Clone ID:”, for a cDNA clone related to each contig sequence. The second column provides the sequence identifier, “SEQ ID NO:X”, for each contig sequence. The third column provides a unique contig identifier, “Contig ID:” for each contig sequence. The fourth column, provides a BAC identifier “BAC ID NO:A” for the BAC clone referenced in the corresponding row of the table. The fifth column provides the nucleotide sequence identifier, “SEQ ID NO:B” for a fragment of the BAC clone identified in column four of the corresponding row of the table. The sixth column, “Exon From-To”, provides the location (i.e., nucleotide position numbers) within the polynucleotide sequence of SEQ ID NO:B which delineate certain polynucleotides of the invention that are also exemplary members of polynucleotide sequences that encode polypeptides of the invention (e.g., polypeptides containing amino acid sequences encoded by the polynucleotide sequences delineated in column six, and fragments and variants thereof).

TABLE 1C

| cDNA | SEQ ID | CONTIG | BAC | SEQ ID | EXON |
|---|---|---|---|---|---|
| Clone ID | NO: X | ID: | ID: A | NO: B | From-To |
| HADMA77 | 14 | 783049 | AC007944 | 221 | 1-3350 |
| HADMA77 | 14 | 783049 | AC018656 | 222 | 1-3349 |
| HADMA77 | 14 | 783049 | AC021874 | 223 | 1-3351 |
| | | | | | 4529-4959 |
| | | | | | 6110-6438 |
| HADMA77 | 14 | 783049 | AC007944 | 224 | 1-941 |
| HADMA77 | 14 | 783049 | AC018656 | 225 | 1-432 |
| HADMA77 | 14 | 783049 | AC018656 | 226 | 1-941 |
| HADMB15 | 15 | 847116 | AC026666 | 227 | 1-385 |
| | | | | | 406-780 |
| HADMB15 | 15 | 847116 | AC026281 | 228 | 1-114 |
| | | | | | 430-875 |
| | | | | | 896-1262 |
| HAGHR18 | 19 | 655435 | AC009671 | 229 | 1-1134 |
| HAQAI92 | 20 | 688037 | AL118502 | 230 | 1-471 |
| | | | | | 571-1561 |
| HAQAI92 | 20 | 688037 | AL161939 | 231 | 1-471 |
| | | | | | 571-1561 |
| HAQAI92 | 20 | 688037 | AC004064 | 232 | 1-471 |
| | | | | | 571-1561 |
| HAQAI92 | 20 | 688037 | AL118502 | 233 | 1-161 |
| HAQAI92 | 20 | 688037 | AL118502 | 234 | 1-285 |
| HAQAI92 | 20 | 688037 | AL161939 | 235 | 1-415 |
| HAQAI92 | 20 | 688037 | AL161939 | 236 | 1-285 |
| HAQAI92 | 20 | 688037 | AC004064 | 237 | 1-285 |
| HAQAI92 | 20 | 688037 | AC004064 | 238 | 1-415 |
| HBAGD86 | 23 | 838799 | AC016755 | 239 | 1-41 |
| | | | | | 1648-1993 |
| | | | | | 2035-3552 |
| | | | | | 3554-6713 |
| HBAGD86 | 23 | 838799 | AC016755 | 240 | 1-161 |
| | | | | | 696-809 |
| | | | | | 2256-2753 |
| | | | | | 6910-6991 |
| | | | | | 7733-7857 |
| | | | | | 9267-9458 |
| | | | | | 10650-10734 |
| | | | | | 11114-11562 |
| | | | | | 11678-11801 |
| | | | | | 12524-12817 |
| | | | | | 14494-15914 |
| HBAGD86 | 23 | 838799 | AC016755 | 241 | 1-217 |
| HBJAB02 | 25 | 837309 | AC015651 | 242 | 1-35 |
| | | | | | 159-252 |
| | | | | | 410-783 |
| | | | | | 786-830 |
| | | | | | 953-1035 |
| | | | | | 1452-1553 |
| | | | | | 1651-2071 |
| | | | | | 2161-2264 |
| | | | | | 2352-2454 |
| | | | | | 2494-2758 |
| | | | | | 2847-3006 |
| | | | | | 3135-3272 |
| | | | | | 3477-4138 |
| | | | | | 4907-5738 |
| | | | | | 5972-6059 |
| | | | | | 6132-6367 |
| | | | | | 6650-6834 |
| | | | | | 6915-7010 |
| | | | | | 7091-7658 |
| | | | | | 7662-9457 |
| | | | | | 10122-10222 |
| | | | | | 11415-11534 |
| | | | | | 12386-12418 |
| | | | | | 13253-13584 |
| | | | | | 13635-13867 |
| | | | | | 14881-15326 |
| | | | | | 15851-16013 |
| | | | | | 16529-16816 |
| | | | | | 17430-17529 |
| | | | | | 18140-18269 |
| | | | | | 18634-18734 |
| | | | | | 19189-19369 |
| | | | | | 20434-21105 |
| | | | | | 21912-22008 |
| HBJAB02 | 25 | 837309 | AC015651 | 243 | 1-2097 |
| | | | | | 5308-5495 |
| | | | | | 5696-5742 |
| | | | | | 5890-6249 |
| | | | | | 7370-7525 |
| | | | | | 7850-8236 |
| | | | | | 8359-8463 |
| | | | | | 8597-8770 |
| | | | | | 8919-9028 |
| | | | | | 9213-9353 |
| | | | | | 9517-9639 |
| | | | | | 9765-9874 |
| | | | | | 9944-11023 |
| | | | | | 11124-11219 |
| | | | | | 11315-11613 |
| | | | | | 11708-12241 |
| | | | | | 12431-12666 |
| | | | | | 12744-12802 |
| | | | | | 12976-13087 |
| | | | | | 13374-13914 |
| | | | | | 14728-15500 |
| HCEEE79 | 30 | 560609 | AC006923 | 244 | 1-1044 |
| HCEEE79 | 30 | 560609 | AC006923 | 245 | 1-207 |
| HCUCF89 | 32 | 637986 | AC022554 | 246 | 1-1066 |
| HCUCF89 | 32 | 637986 | AC022554 | 247 | 1-692 |
| HCUCF89 | 32 | 637986 | AC022554 | 248 | 1-643 |
| HCWAE64 | 33 | 535893 | AL157935 | 249 | 1-1319 |
| | | | | | 2024-2316 |
| | | | | | 2937-2984 |
| | | | | | 3126-3281 |
| | | | | | 5595-5703 |
| | | | | | 5788-6574 |
| | | | | | 6667-6733 |
| | | | | | 6788-6880 |
| | | | | | 6962-7303 |
| | | | | | 8111-11869 |
| | | | | | 12019-12418 |
| | | | | | 12420-12679 |
| | | | | | 13140-13191 |
| HCWAE64 | 33 | 535893 | AL157935 | 250 | 1-1316 |
| HCWAE64 | 33 | 535893 | AL157935 | 251 | 1-309 |
| HCWUL09 | 34 | 834722 | AL138741 | 252 | 1-755 |
| HCWUL09 | 34 | 834722 | AL138741 | 253 | 1-555 |
| HDPDI72 | 35 | 897277 | AL139238 | 254 | 1-76 |
| | | | | | 3170-3542 |
| | | | | | 4724-5613 |
| | | | | | 6598-6719 |
| | | | | | 6954-7373 |
| | | | | | 8256-8349 |
| | | | | | 10408-11003 |
| HDPDI72 | 35 | 897277 | AL139238 | 255 | 1-279 |
| HDPFY18 | 36 | 779450 | AC011875 | 256 | 1-1880 |
| HDPFY18 | 36 | 779450 | AP000848 | 257 | 1-1470 |
| HDPFY18 | 36 | 779450 | AP000663 | 258 | 1-3332 |
| HDTLM18 | 40 | 836057 | AL049843 | 259 | 1-148 |
| | | | | | 811-1104 |
| | | | | | 2196-2793 |
| | | | | | 2930-2991 |
| | | | | | 3921-4047 |
| | | | | | 6575-6627 |
| | | | | | 8124-8659 |
| | | | | | 8741-8843 |
| | | | | | 9448-9886 |
| | | | | | 10480-10524 |
| | | | | | 10944-11103 |
| | | | | | 13917-14450 |
| | | | | | 14801-15344 |
| | | | | | 16392-17295 |
| | | | | | 18110-18311 |
| | | | | | 20445-21421 |
| | | | | | 21596-22268 |
| | | | | | 23857-23968 |
| | | | | | 24205-24585 |
| | | | | | 24623-24701 |
| | | | | | 25168-25575 |
| | | | | | 28078-28391 |
| | | | | | 28548-28707 |
| | | | | | 29039-29839 |
| | | | | | 30732-31495 |
| | | | | | 32024-32487 |
| | | | | | 32521-33216 |
| | | | | | 34511-34647 |
| | | | | | 35166-35720 |
| | | | | | 36527-36797 |
| | | | | | 36993-37125 |
| | | | | | 38178-38288 |
| | | | | | 39341-39646 |
| | | | | | 41511-41570 |
| | | | | | 42307-42873 |
| | | | | | 42914-43014 |
| | | | | | 43248-43465 |
| | | | | | 43589-43690 |
| | | | | | 43724-43909 |
| | | | | | 44170-44333 |
| | | | | | 44517-45130 |
| | | | | | 45497-45961 |
| | | | | | 46215-46842 |
| | | | | | 47926-48126 |
| | | | | | 49391-51961 |
| HDTLM18 | 40 | 836057 | AL049843 | 260 | 1-2071 |
| HDTLM18 | 40 | 836057 | AL049843 | 261 | 1-76 |
| | | | | | 2590-2720 |
| | | | | | 4185-4370 |
| | | | | | 8016-8395 |
| | | | | | 8399-8917 |
| | | | | | 10395-10596 |
| | | | | | 10622-11056 |
| | | | | | 15325-15963 |
| | | | | | 18377-18495 |
| HFIJA29 | 49 | 839206 | AC009954 | 275 | 1-426 |
| HFKFX64 | 50 | 566835 | AP001203 | 276 | 1-870 |
| HFKFX64 | 50 | 566835 | AC025291 | 277 | 1-868 |
| HFKFX64 | 50 | 566835 | AC010798 | 278 | 1-868 |
| HFKFX64 | 50 | 566835 | AP001203 | 279 | 1-750 |
| HFKFX64 | 50 | 566835 | AC025291 | 280 | 1-750 |
| HFKFX64 | 50 | 566835 | AC010798 | 281 | 1-750 |
| HGBER72 | 51 | 826710 | AL157935 | 282 | 1-1319 |
| | | | | | 2024-2316 |
| | | | | | 2937-2984 |
| | | | | | 3126-3281 |
| | | | | | 5595-5703 |
| | | | | | 5788-6574 |
| | | | | | 6667-6733 |
| | | | | | 6788-6880 |
| | | | | | 6962-7303 |
| | | | | | 8111-11869 |
| | | | | | 12019-12418 |
| | | | | | 12420-12679 |
| | | | | | 13140-13191 |
| HGBER72 | 51 | 826710 | AL157935 | 283 | 1-1316 |
| HGBER72 | 51 | 826710 | AL157935 | 284 | 1-309 |
| HGLBG15 | 53 | 701990 | AC005082 | 285 | 1-252 |
| | | | | | 2150-2418 |
| | | | | | 2461-2695 |
| | | | | | 2700-3101 |
| | | | | | 3368-3776 |
| | | | | | 6066-6250 |
| | | | | | 7105-7363 |
| | | | | | 8329-9740 |
| HGLBG15 | 53 | 701990 | AC073992 | 286 | 1-259 |
| | | | | | 1225-2636 |
| HGLBG15 | 53 | 701990 | AC005082 | 287 | 1-546 |
| HGLBG15 | 53 | 701990 | AC073992 | 288 | 1-282 |
| HHFEC39 | 54 | 609873 | AL022726 | 289 | 1-819 |
| | | | | | 1137-4813 |
| HHFEC39 | 54 | 609873 | AL022726 | 290 | 1-509 |
| HHSDI53 | 55 | 862028 | AP001456 | 291 | 1-1611 |
| | | | | | 1654-2020 |
| | | | | | 2187-2263 |
| HHSDI53 | 55 | 862028 | AL109936 | 292 | 1-1611 |
| | | | | | 1654-2020 |
| | | | | | 2186-2322 |
| | | | | | 2673-3243 |
| | | | | | 3291-3857 |
| | | | | | 4276-4892 |
| | | | | | 5002-5380 |
| | | | | | 8185-8499 |
| | | | | | 8705-8842 |
| | | | | | 10146-10298 |
| | | | | | 12526-12652 |
| | | | | | 12780-14327 |
| HHSDI53 | 55 | 862028 | AP001456 | 293 | 1-482 |
| HHSDI53 | 55 | 862028 | AL109936 | 294 | 1-188 |
| HISBA38 | 56 | 561711 | AL137020 | 295 | 1-1169 |
| HISBA38 | 56 | 561711 | AL359254 | 296 | 1-1169 |
| HISBA38 | 56 | 561711 | AL137020 | 297 | 1-702 |
| HISBA38 | 56 | 561711 | AL359254 | 298 | 1-702 |
| HLYGE16 | 59 | 651339 | AC025594 | 299 | 1-272 |
| | | | | | 301-388 |
| | | | | | 531-1439 |
| | | | | | 1461-3200 |
| HLYGE16 | 59 | 651339 | AC073849 | 300 | 1-272 |
| | | | | | 301-388 |
| | | | | | 531-1439 |
| | | | | | 1461-3200 |
| HLYGE16 | 59 | 651339 | AC025594 | 301 | 1-337 |
| HLYGE16 | 59 | 651339 | AC073849 | 302 | 1-337 |
| HMCFH60 | 61 | 654853 | AL122034 | 303 | 1-785 |
| | | | | | 1072-3055 |
| HMCFH60 | 61 | 654853 | AC073394 | 304 | 1-326 |
| | | | | | 1898-2079 |
| | | | | | 2460-2702 |
| | | | | | 4498-4586 |
| | | | | | 5598-7296 |
| | | | | | 7560-7669 |
| | | | | | 8015-8460 |
| | | | | | 8479-8539 |
| | | | | | 8918-9242 |
| | | | | | 10451-10975 |
| | | | | | 13375-13521 |
| | | | | | 13561-15769 |
| | | | | | 16055-18038 |
| HMCFH60 | 61 | 654853 | AL160264 | 305 | 1-86 |
| | | | | | 1101-2799 |
| | | | | | 3063-3172 |
| | | | | | 3518-3963 |
| | | | | | 3982-4042 |
| | | | | | 4421-4745 |
| | | | | | 5954-6478 |
| | | | | | 8877-9023 |
| | | | | | 9063-11271 |
| | | | | | 11557-13540 |
| HMCFH60 | 61 | 654853 | AC073394 | 306 | 1-309 |
| HMCFH60 | 61 | 654853 | AC073394 | 307 | 1-577 |
| HMIAK10 | 62 | 562774 | AP000817 | 308 | 1-1044 |
| HMIAK10 | 62 | 562774 | AC024177 | 309 | 1-1047 |
| HMIAK10 | 62 | 562774 | AC011009 | 310 | 1-1047 |
| HMIBD93 | 63 | 634227 | AC010913 | 311 | 1-3640 |
| HMIBD93 | 63 | 634227 | AC010913 | 312 | 1-495 |
| | | | | | 593-668 |
| | | | | | 670-1055 |
| | | | | | 1578-1799 |
| | | | | | 2445-2717 |
| | | | | | 3103-3203 |
| | | | | | 3284-3751 |
| | | | | | 3841-4032 |
| | | | | | 5093-5261 |
| | | | | | 5443-5872 |
| | | | | | 5922-6838 |
| | | | | | 7633-8170 |
| | | | | | 8304-8491 |
| | | | | | 8968-9029 |
| | | | | | 9888-10020 |
| | | | | | 10479-10733 |
| | | | | | 10807-10958 |
| | | | | | 11020-11132 |
| | | | | | 12080-12373 |
| | | | | | 12464-12585 |
| | | | | | 13223-13381 |
| | | | | | 17379-17471 |
| | | | | | 18572-19447 |
| HMWJF53 | 64 | 758158 | AC021016 | 313 | 1-739 |
| | | | | | 792-852 |
| | | | | | 1482-1572 |
| | | | | | 1670-4387 |
| HMWJF53 | 64 | 758158 | AC021016 | 314 | 1-276 |
| HNECL22 | 65 | 799541 | AF216674 | 315 | 1-2837 |
| HNECL22 | 65 | 799541 | AC051642 | 316 | 1-2201 |
| HNECL22 | 65 | 799541 | AF216674 | 317 | 1-462 |
| HNECL22 | 65 | 799541 | AF216674 | 318 | 1-836 |
| HNECL22 | 65 | 799541 | AC051642 | 319 | 1-462 |
| HNGEA34 | 67 | 815678 | AC068137 | 320 | 1-1100 |
| HNGKT41 | 69 | 836061 | AC008581 | 321 | 1-1099 |
| HNGNO53 | 70 | 836063 | AC023387 | 322 | 1-869 |
| HNGNO53 | 70 | 836063 | AL355500 | 323 | 1-851 |
| HNHCT47 | 71 | 634691 | AC027793 | 324 | 1-147 |
| HNHCT47 | 71 | 634691 | AC022107 | 325 | 1-111 |
| HNHCT47 | 71 | 634691 | AP001271 | 326 | 1-610 |
| HNHCT47 | 71 | 634691 | AP000487 | 327 | 1-610 |
| HNHCT47 | 71 | 634691 | AP000405 | 328 | 1-612 |
| HNHCT47 | 71 | 634691 | AP001271 | 329 | 1-375 |
| HNHCT47 | 71 | 634691 | AP000487 | 330 | 1-36 |
| | | | | | 434-873 |
| HNHCT47 | 71 | 634691 | AP000405 | 331 | 1-375 |
| HORBS82 | 73 | 638293 | AL034419 | 332 | 1-1798 |
| HORBS82 | 73 | 638293 | AL034419 | 333 | 1-1186 |
| HOUDE92 | 74 | 580866 | AC005865 | 334 | 1-173 |
| | | | | | 553-629 |
| | | | | | 1941-2042 |
| | | | | | 2757-2891 |
| | | | | | 3294-3378 |
| | | | | | 4606-5498 |
| | | | | | 5550-8125 |
| HPCAL26 | 77 | 762822 | AP000654 | 335 | 1-4150 |
| HPEBA84 | 78 | 753957 | AL357372 | 336 | 1-1238 |
| HPEBA84 | 78 | 753957 | AL161799 | 337 | 1-1112 |
| HPEBA84 | 78 | 753957 | AL357372 | 338 | 1-294 |
| HPEBA84 | 78 | 753957 | AL357372 | 339 | 1-140 |
| HPEBA84 | 78 | 753957 | AL161799 | 340 | 1-294 |
| HSAVA08 | 79 | 580870 | AC009030 | 341 | 1-1052 |
| HSAVA08 | 79 | 580870 | AC009030 | 342 | 1-431 |
| HSHAX04 | 80 | 812178 | AL049824 | 343 | 1-110 |
| | | | | | 1211-1257 |
| | | | | | 1740-1878 |
| | | | | | 3062-3144 |
| | | | | | 3668-3772 |
| | | | | | 4775-5175 |
| | | | | | 5220-5345 |
| | | | | | 7001-7384 |
| | | | | | 8361-8657 |
| | | | | | 8747-8937 |
| | | | | | 9876-9980 |
| | | | | | 12753-12901 |
| | | | | | 13131-13891 |
| | | | | | 14272-14726 |
| | | | | | 14851-16619 |
| | | | | | 16683-17910 |
| | | | | | 18078-18367 |
| HSHAX04 | 80 | 812178 | AL354888 | 344 | 1-47 |
| | | | | | 1277-1376 |
| | | | | | 2477-2523 |
| | | | | | 3006-3144 |
| | | | | | 4326-4408 |
| | | | | | 4932-5036 |
| | | | | | 6039-6439 |
| | | | | | 6484-6609 |
| | | | | | 8265-8648 |
| | | | | | 9625-9921 |
| | | | | | 10011-10216 |
| | | | | | 11141-11245 |
| | | | | | 14019-14167 |
| | | | | | 14397-15157 |
| | | | | | 15538-15992 |
| | | | | | 16117-17885 |
| | | | | | 17949-19176 |
| | | | | | 19344-19633 |
| HSHAX04 | 80 | 812178 | AL354888 | 345 | 1-314 |
| HSHAX04 | 80 | 812178 | AL354888 | 346 | 1-599 |
| HSKDR27 | 81 | 580874 | AC008742 | 347 | 1-50 |
| | | | | | 1016-1321 |
| | | | | | 1979-2220 |
| | | | | | 2313-3310 |
| HSKDR27 | 81 | 580874 | AC008742 | 348 | 1-495 |
| HSQBF66 | 82 | 560726 | AC011878 | 349 | 1-117 |
| | | | | | 4124-5072 |
| | | | | | 5221-5252 |
| HSRFD18 | 83 | 840771 | AL096819 | 350 | 1-3975 |
| HSRFD18 | 83 | 840771 | AL096819 | 351 | 1-304 |
| HT3BF49 | 85 | 838620 | AL355304 | 352 | 1-2144 |
| HT3BF49 | 85 | 838620 | AL355307 | 353 | 1-2144 |
| HT3BF49 | 85 | 838620 | AL355304 | 354 | 1-517 |
| HT3BF49 | 85 | 838620 | AL355307 | 355 | 1-517 |
| HTEHU59 | 87 | 840385 | AP001003 | 356 | 1-3207 |
| HTEHU59 | 87 | 840385 | AP001557 | 357 | 1-3206 |
| HTEHU59 | 87 | 840385 | AP001156 | 358 | 1-3207 |
| HTEHU59 | 87 | 840385 | AP001003 | 359 | 1-863 |
| HTEHU59 | 87 | 840385 | AP001003 | 360 | 1-1399 |
| | | | | | 1504-1948 |
| | | | | | 1956-2672 |
| | | | | | 2761-2905 |
| | | | | | 3007-3135 |
| | | | | | 3290-3445 |
| | | | | | 3537-3653 |
| | | | | | 3746-3913 |
| | | | | | 4010-4131 |
| | | | | | 4251-4428 |
| HTEHU59 | 87 | 840385 | AP001557 | 361 | 1-863 |
| HTEHU59 | 87 | 840385 | AP001557 | 362 | 1-1395 |
| | | | | | 1500-1944 |
| | | | | | 1952-2667 |
| | | | | | 2757-2900 |
| | | | | | 3002-3130 |
| | | | | | 3285-3439 |
| HTEHU59 | 87 | 840385 | AP001156 | 363 | 1-1396 |
| | | | | | 1502-1945 |
| | | | | | 1953-2668 |
| HTEHU59 | 87 | 840385 | AP001156 | 364 | 1-863 |
| HTTEE41 | 95 | 840950 | AC018921 | 365 | 1-92 |
| | | | | | 318-578 |
| | | | | | 837-912 |
| | | | | | 1091-1249 |
| | | | | | 1321-1387 |
| | | | | | 1862-2192 |
| | | | | | 2485-2579 |
| | | | | | 2708-2831 |
| | | | | | 3685-4257 |
| | | | | | 4547-5127 |
| | | | | | 5811-6037 |
| | | | | | 6562-7076 |
| | | | | | 7541-7678 |
| | | | | | 8069-8191 |
| | | | | | 10100-10207 |
| | | | | | 11102-11688 |
| | | | | | 11721-11847 |
| | | | | | 12201-12335 |
| | | | | | 12532-12641 |
| | | | | | 12888-12991 |
| | | | | | 13027-13546 |
| | | | | | 13637-16146 |
| HTTEE41 | 95 | 840950 | AC018921 | 366 | 1-100 |
| HTXJD85 | 96 | 840391 | AC078797 | 367 | 1-1239 |
| HTXJD85 | 96 | 840391 | AC078797 | 368 | 1-2296 |
| | | | | | 2428-2719 |
| HTXJD85 | 96 | 840391 | AC078797 | 369 | 1-224 |
| HWHPB78 | 99 | 740778 | AL157945 | 370 | 1-300 |
| | | | | | 364-790 |
| | | | | | 1344-1519 |
| | | | | | 1584-1709 |
| | | | | | 2403-2580 |
| | | | | | 4780-4968 |
| | | | | | 5485-5559 |
| | | | | | 5960-6128 |
| | | | | | 6243-6955 |
| | | | | | 7258-7317 |
| | | | | | 9073-9145 |
| | | | | | 9404-9544 |
| | | | | | 10342-10513 |
| | | | | | 10746-11354 |
| | | | | | 12004-12578 |
| | | | | | 12863-13087 |
| | | | | | 13224-13382 |
| | | | | | 13993-14047 |
| | | | | | 14319-14444 |
| | | | | | 14753-14878 |
| | | | | | 15465-15713 |
| | | | | | 16007-16123 |
| | | | | | 17413-17740 |
| | | | | | 17817-18127 |
| | | | | | 18231-18634 |
| | | | | | 18771-18881 |
| | | | | | 19945-20231 |
| | | | | | 21024-21169 |
| | | | | | 23112-23363 |
| | | | | | 23692-24413 |
| HWHPB78 | 99 | 740778 | AC026283 | 371 | 1-292 |
| | | | | | 353-776 |
| | | | | | 1340-1506 |
| | | | | | 1568-1696 |
| | | | | | 2408-2534 |
| | | | | | 4767-4955 |
| | | | | | 5472-5546 |
| | | | | | 5957-6293 |
| | | | | | 6373-7085 |
| | | | | | 7386-7445 |
| | | | | | 9201-9273 |
| | | | | | 9532-9672 |
| | | | | | 10470-10641 |
| | | | | | 10873-11481 |
| | | | | | 12131-12705 |
| | | | | | 12990-13214 |
| | | | | | 13351-13509 |
| | | | | | 14119-14173 |
| | | | | | 14445-14570 |
| | | | | | 14879-15004 |
| | | | | | 15604-15844 |
| | | | | | 16133-16253 |
| | | | | | 17540-17867 |
| | | | | | 17944-18254 |
| | | | | | 18356-18755 |
| | | | | | 18892-19002 |
| | | | | | 20066-20352 |
| | | | | | 21146-21308 |
| | | | | | 23235-23486 |
| | | | | | 23813-24533 |
| HWHPB78 | 99 | 740778 | AL157945 | 372 | 1-490 |
| HWHPB78 | 99 | 740778 | AC026283 | 373 | 1-318 |
| HWLBO67 | 100 | 834315 | AC011739 | 374 | 1-517 |
| HWLBO67 | 100 | 834315 | AC011739 | 375 | 1-586 |
| | | | | | 3120-3867 |
| | | | | | 4726-4866 |
| | | | | | 6044-6395 |
| | | | | | 6686-7156 |
| | | | | | 11614-12016 |
| | | | | | 18205-18501 |
| HWLBO67 | 100 | 834315 | AC011739 | 376 | 1-202 |
| HE2CA60 | 103 | 888705 | AC005921 | 377 | 1-74 |
| | | | | | 276-1076 |
| | | | | | 1472-2160 |
| | | | | | 3055-3389 |
| | | | | | 3769-3898 |
| | | | | | 4143-4288 |
| | | | | | 4322-4697 |
| | | | | | 4699-4772 |
| | | | | | 6745-6851 |
| | | | | | 7692-9044 |
| | | | | | 9581-9743 |
| | | | | | 13540-17646 |
| | | | | | 1-74 |
| | | | | | 276-1076 |
| | | | | | 1472-2160 |
| | | | | | 3055-3389 |
| | | | | | 3769-3898 |
| | | | | | 4143-4288 |
| | | | | | 4322-4697 |
| | | | | | 4699-4772 |
| | | | | | 6745-6851 |
| | | | | | 7692-9044 |
| | | | | | 9581-9743 |
| | | | | | 13540-17646 |
| HE2CA60 | 103 | 888705 | AC005921 | 378 | 1-1466 |
| | | | | | 1-1466 |
| HEQBJ01 | 106 | 876546 | AC009079 | 379 | 1-198 |
| | | | | | 1263-1467 |
| | | | | | 2271-2369 |
| | | | | | 5035-5870 |
| | | | | | 5888-6174 |
| | | | | | 6249-6472 |
| | | | | | 7148-11343 |
| | | | | | 1-198 |
| | | | | | 1263-1467 |
| | | | | | 2271-2369 |
| | | | | | 5035-5870 |
| | | | | | 5888-6174 |
| | | | | | 6249-6472 |
| | | | | | 7148-11343 |
| HEQBJ01 | 106 | 876546 | AC009079 | 380 | 1-173 |
| | | | | | 916-970 |
| | | | | | 1-173 |
| | | | | | 916-970 |

[0094] Tables 1D: The polynucleotides or polypeptides, or agonists or antagonists of the present invention can be used in assays to test for one or more biological activities. If these polynucleotides and polypeptides do exhibit activity in a particular assay, it is likely that these molecules may be involved in the diseases associated with the biological activity. Thus, the polynucleotides or polypeptides, or agonists or antagonists could be used to treat the associated disease.

[0095] The present invention encompasses methods of detecting, preventing, diagnosing, prognosticating, treating, and/or ameliorating a disease or disorder. In preferred embodiments, the present invention encompasses a method of treating an allergic and/or asthmatic disease or disorder comprising administering to a patient in which such detection, treatment, prevention, and/or amelioration is desired a protein, nucleic acid, or antibody of the invention (or fragment or variant thereof) in an amount effective to detect, prevent, diagnose, prognosticate, treat, and/or ameliorate the allergic and/or asthmatic disease or disorder.

[0096] In another embodiment, the present invention also encompasses methods of detecting, preventing, diagnosing, prognosticating, treating, and/or ameliorating an allergic and/or asthmatic disease or disorder; comprising administering to a patient combinations of the proteins, nucleic acids, or antibodies of the invention (or fragments or variants thereof), sharing similar indications as shown in the corresponding rows in Column 3 of Table 1D.

[0097] Table 1D provides information related to biological activities for polynucleotides and polypeptides of the invention (including antibodies, agonists, and/or antagonists thereof). Table 1D also provides information related to assays which may be used to test polynucleotides and polypeptides of the invention (including antibodies, agonists, and/or antagonists thereof) for the corresponding biological activities. The first column (“Gene No.”) provides the gene number in the application for each clone identifier. The second column (“cDNA Clone ID:”) provides the unique clone identifier for each clone as previously described and indicated in Table 1A through Table 1D. The third column (“AA SEQ ID NO:Y”) indicates the Sequence Listing SEQ ID Number for polypeptide sequences encoded by the corresponding cDNA clones (also as indicated in Tables 1A, Table 1B, and Table 2). The fourth column (“Biological Activity”) indicates a biological activity corresponding to the indicated polypeptides (or polynucleotides encoding said polypeptides). The fifth column (“Exemplary Activity Assay”) further describes the corresponding biological activity and also provides information pertaining to the various types of assays that may be performed to test, demonstrate, or quantify the corresponding biological activity.

[0098] Table 1D describes the use of, inter alia, FMAT technology for testing or demonstrating various biological activities. Fluorometric microvolume assay technology (FMAT) is a fluorescence-based system that provides a means to perform nonradioactive cell- and bead-based assays to detect activation of cell signal transduction pathways. This technology was designed specifically for ligand binding and immunological assays. Using this technology, fluorescent cells or beads at the bottom of the well are detected as localized areas of concentrated fluorescence using a data processing system. Unbound flurophore comprising the background signal is ignored, allowing for a wide variety of homogeneous assays. FMAT technology may be used for peptide ligand binding assays, immunofluorescence, apoptosis, cytotoxicity, and bead-based immunocapture assays. See, Miraglia S et. al., “Homogeneous cell and bead based assays for highthroughput screening using flourometric microvolume assay technology,” Journal of Biomolecular Screening; 4:193-204 (1999). In particular, FMAT technology may be used to test, confirm, and/or identify the ability of polypeptides (including polypeptide fragments and variants) to activate signal transduction pathways. For example, FMAT technology may be used to test, confirm, and/or identify the ability of polypeptides to upregulate production of immunomodulatory proteins (such as, for example, interleukins, GM-CSF, Rantes, and Tumor Necrosis factors, as well as other cellular regulators (e.g. insulin)).

[0099] Table 1D also describes the use of kinase assays for testing, demonstrating, or quantifying biological activity. In this regard, the phosphorylation and de-phosphorylation of specific amino acid residues (e.g. Tyrosine, Serine, Threonine) on cell-signal transduction proteins provides a fast, reversible means for activation and de-activation of cellular signal transduction pathways. Moreover, cell signal transduction via phosphorylation/de-phosphorylation is crucial to the regulation of a wide variety of cellular processes (e.g. proliferation, differentiation, migration, apoptosis, etc.). Accordingly, kinase assays provide a powerful tool useful for testing, confirming, and/or identifying polypeptides (including polypeptide fragments and variants) that mediate cell signal transduction events via protein phosphorylation. See e.g., Forrer, P., Tamaskovic R., and Jaussi, R. “Enzyme-Linked Immunosorbent Assay for Measurement of JNK, ERK, and p38 Kinase Activities” Biol. Chem. 379(8-9): 1101-1110 (1998).

LENGTHY TABLE REFERENCED HERE
US20070015162A1-20070118-T00001
Please refer to the end of the specification for access instructions.

[0100] Table 1E: Polynucleotides encoding polypeptides of the present invention can be used in assays to test for one or more biological activities. One such biological activity which may be tested includes the ability of polynucleotides and polypeptides of the invention to stimulate up-regulation or down-regulation of expression of particular genes and proteins. Hence, if polynucleotides and polypeptides of the present invention exhibit activity in altering particular gene and protein expression patterns, it is likely that these polynucleotides and polypeptides of the present invention may be involved in, or capable of effecting changes in, diseases associated with the altered gene and protein expression profiles. Hence, polynucleotides, polypeptides, or antibodies of the present invention could be used to treat said associated diseases.

[0101] TaqMan® assays may be performed to assess the ability of polynucleotides (and polypeptides they encode) to alter the expression pattern of particular “target” genes. TaqMan® reactions are performed to evaluate the ability of a test agent to induce or repress expression of specific genes in different cell types. TaqMan® gene expression quantification assays (“TaqMan® assays”) are well known to, and routinely performed by, those of ordinary skill in the art. TaqMan® assays are performed in a two step reverse transcription/polymerase chain reaction (RT-PCR). In the first (RT) step, cDNA is reverse transcribed from total RNA samples using random hexamer primers. In the second (PCR) step, PCR products are synthesized from the cDNA using gene specific primers.

[0102] To quantify gene expression the Taqman® PCR reaction exploits the 5′ nuclease activity of AmpliTaq Gold® DNA Polymerase to cleave a Taqman® probe (distinct from the primers) during PCR. The Taqman® probe contains a reporter dye at the 5′-end of the probe and a quencher dye at the 3′ end of the probe. When the probe is intact, the proximity of the reporter dye to the quencher dye results in suppression of the reporter fluorescence. During PCR, if the target of interest is present, the probe specifically anneals between the forward and reverse primer sites. AmpliTaq Fold DNA Polymerase then cleaves the probe between the reporter and quencher when the probe hybridizes to the target, resulting in increased fluorescence of the reporter (see FIG. 2). Accumulation of PCR products is detected directly by monitoring the increase in fluorescence of the reporter dye.

[0103] After the probe fragments are displaced from the target, polymerization of the strand continues. The 3′-end of the probe is blocked to prevent extension of the probe during PCR. This process occurs in every cycle and does not interfere with the exponential accumulation of product. The increase in fluorescence signal is detected only if the target sequence is complementary to the probe and is amplified during PCR. Because of these requirements, any nonspecific amplification is not detected.

[0104] For test sample preparation, vector controls or constructs containing the coding sequence for the gene of interest are transfected into cells, such as for example 293T cells, and supernatants collected after 48 hours. For cell treatment and RNA isolation, multiple primary human cells or human cell lines are used; such cells may include but are not limited to, Normal Human Dermal Fibroblasts, Aortic Smooth Muscle, Human Umbilical Vein Endothelial Cells, HepG2, Daudi, Jurkat, U937, Caco, and THP-1 cell lines. Cells are plated in growth media and growth is arrested by culturing without media change for 3 days, or by switching cells to low serum media and incubating overnight. Cells are treated for 1, 6, or 24 hours with either vector control supernatant or sample supernatant (or purified/partially purified protein preparations in buffer). Total RNA is isolated; for example, by using Trizol extraction or by using the Ambion RNAqueous™-4PCR RNA isolation system. Expression levels of multiple genes are analyzed using TAQMAN, and expression in the test sample is compared to control vector samples to identify genes induced or repressed. Each of the above described techniques are well known to, and routinely performed by, those of ordinary skill in the art.

[0105] Table 1E indicates particular disease classes and preferred indications for which polynucleotides, polypeptides, or antibodies of the present invention may be used in detecting, diagnosing, preventing, treating and/or ameliorating said diseases and disorders based on “target” gene expression patterns which may be up- or down-regulated by polynucleotides (and the encoded polypeptides) corresponding to each indicated cDNA Clone ID (shown in Table 1E, Column 2).

[0106] Thus, in preferred embodiments, the present invention encompasses a method of detecting, diagnosing, preventing, treating, and/or ameliorating a disease or disorder listed in the “Disease Class” and/or “Preferred Indication” columns of Table 1E; comprising administering to a patient in which such detection, diagnosis, prevention, or treatment is desired a protein, nucleic acid, or antibody of the invention (or fragment or variant thereof) in an amount effective to detect, diagnose, prevent, treat, or ameliorate the disease or disorder. The first and second columns of Table 1D show the “Gene No.” and “cDNA Clone ID No.”, respectively, indicating certain nucleic acids and proteins (or antibodies against the same) of the invention (including polynucleotide, polypeptide, and antibody fragments or variants thereof) that may be used in detecting, diagnosing, preventing, treating, or ameliorating the disease(s) or disorder(s) indicated in the corresponding row in the “Disease Class” or “Preferred Indication” Columns of Table 1E.

[0107] In another embodiment, the present invention also encompasses methods of detecting, diagnosing, preventing, treating, or ameliorating a disease or disorder listed in the “Disease Class” or “Preferred Indication” Columns of Table 1E; comprising administering to a patient combinations of the proteins, nucleic acids, or antibodies of the invention (or fragments or variants thereof), sharing similar indications as shown in the corresponding rows in the “Disease Class” or “Preferred Indication” Columns of Table 1E.

[0108] The “Disease Class” Column of Table 1E provides a categorized descriptive heading for diseases, disorders, and/or conditions (more fully described below) that may be detected, diagnosed, prevented, treated, or ameliorated by a protein, nucleic acid, or antibody of the invention (or fragment or variant thereof).

[0109] The “Preferred Indication” Column of Table 1E describes diseases, disorders, and/or conditions that may be detected, diagnosed, prevented, treated, or ameliorated by a protein, nucleic acid, or antibody of the invention (or fragment or variant thereof).

[0110] The “Cell Line” and “Exemplary Targets” Columns of Table 1E indicate particular cell lines and target genes, respectively, which may show altered gene expression patterns (i.e., up- or down-regulation of the indicated target gene) in Taqman assays, performed as described above, utilizing polynucleotides of the cDNA Clone ID shown in the corresponding row. Alteration of expression patterns of the indicated “Exemplary Target” genes is correlated with a particular “Disease Class” and/or “Preferred Indication” as shown in the corresponding row under the respective column headings.

[0111] The “Exemplary Accessions” Column indicates GenBank Accessions (available online through the National Center for Biotechnology Information (NCBI) at http://www.ncbi.nlm.nih.gov/) which correspond to the “Exemplary Targets” shown in the adjacent row.

[0112] The recitation of “Cancer” in the “Disease Class” Column indicates that the corresponding nucleic acid and protein, or antibody against the same, of the invention (or fragment or variant thereof) may be used for example, to detect, diagnose, prevent, treat, and/or ameliorate neoplastic diseases and/or disorders (e.g., leukemias, cancers, etc., as described below under “Hyperproliferative Disorders”).

[0113] The recitation of “Immune” in the “Disease Class” column indicates that the corresponding nucleic acid and protein, or antibody against the same, of the invention (or fragment or variant thereof), may be used for example, to detect, diagnose, prevent, treat, and/or ameliorate diseases and/or disorders relating to neoplastic diseases (e.g., as described below under “Hyperproliferative Disorders”), blood disorders (e.g., as described below under “Immune Activity” “Cardiovascular Disorders” and/or “Blood-Related Disorders”), and infections (e.g., as described below under “Infectious Disease”).

[0114] The recitation of “Angiogenesis” in the “Disease Class” column indicates that the corresponding nucleic acid and protein, or antibody against the same, of the invention (or fragment or variant thereof), may be used for example, to detect, diagnose, treat, prevent, and/or ameliorate diseases and/or disorders relating to neoplastic diseases (e.g., as described below under “Hyperproliferative Disorders”), diseases and/or disorders of the cardiovascular system (e.g., as described below under “Cardiovascular Disorders”), diseases and/or disorders involving cellular and genetic abnormalities (e.g., as described below under “Diseases at the Cellular Level”), diseases and/or disorders involving angiogenesis (e.g., as described below under “Anti-Angiogenesis Activity”), to promote or inhibit cell or tissue regeneration (e.g., as described below under “Regeneration”), or to promote wound healing (e.g., as described below under “Wound Healing and Epithelial Cell Proliferation”).

[0115] The recitation of “Diabetes” in the “Disease Class” column indicates that the corresponding nucleic acid and protein, or antibody against the same, of the invention (or fragment or variant thereof), may be used for example, to detect, diagnose, treat, prevent, and/or ameliorate diabetes (including diabetes mellitus types I and II), as well as diseases and/or disorders associated with, or consequential to, diabetes (e.g. as described below under “Endocrine Disorders,” “Renal Disorders,” and “Gastrointestinal Disorders”).

TABLE 1E

| Gene | cDNA | Disease | | | Exemplary | Exemplary |
|---|---|---|---|---|---|---|
| No. | Clone ID | Class | Preferred Indications: | Cell Line: | Targets | Accessions |
| 76 | HTEEW69 | Immune | Highly preferred indications include immunological disorders | AOSMC | CCR7 | gb\|X84702\|HSDNABLR2 |
| | | | such as described herein under the heading “Immune | | CXCR3 | gb\|Z79783\|HSCKRL2 |
| | | | Activity” and/or “Blood-Related Disorders” | | Rag2 | gb\|AY011962\|AY011962 |
| | | | (particularly including, but not limited to, immune | | VLA4 | gb\|X16983\|HSINTAL4 |
| | | | disorders involving muscle tissues and the cardiovascular | | | |
| | | | system (e.g. heart, lungs, circulatory system)). Highly | | | |
| | | | preferred embodiments of the invention include methods of | | | |
| | | | preventing, detecting, diagnosing, treating and/or ameliorating | | | |
| | | | disorders of the immune system (particularly including, | | | |
| | | | but not limited to, immune disorders involving muscle | | | |
| | | | tissue or the cardiovascular system). (AOSMC cells are | | | |
| | | | human aortic smooth muscle cells). | | | |
| 76 | HTEEW69 | Immune | Highly preferred indications include immunological disorders | Caco-2 | TNF | gb\|AJ270944\|HSA27094 |
| | | | such as described herein under the heading “Immune | | | |
| | | | Activity” and/or “Blood-Related Disorders” | | | |
| | | | (particularly including, but not limited to, immune | | | |
| | | | disorders involving the cells of the gastrointestinal tract). | | | |
| | | | Highly preferred embodiments of the invention include | | | |
| | | | methods of preventing, detecting, diagnosing, treating | | | |
| | | | and/or ameliorating disorders of the immune system | | | |
| | | | (particularly including, but not limited to, immune | | | |
| | | | disorders involving cells of the gastrointestinal tract). | | | |
| | | | (The Caco-2 cell line is a human colorectal adenocarcinoma | | | |
| | | | cell line available through the ATCC as cell line number | | | |
| | | | HTB-37). | | | |
| 76 | HTEEW69 | Immune | Highly preferred indications include immunological disorders | Daudi | GATA3 | gb\|X55037\|HSGATA3 |
| | | | such as described herein under the heading “Immune | | ICAM | gb\|X06990\|HSICAM1 |
| | | | Activity” and/or “Blood-Related Disorders” | | TNF | gb\|AJ270944\|HSA27094 |
| | | | (particularly including, but not limited to, immune | | | |
| | | | disorders involving the B-cells). Highly preferred | | | |
| | | | embodiments of the invention include methods of preventing, | | | |
| | | | detecting, diagnosing, treating and/or ameliorating disorders | | | |
| | | | of the immune system (particularly including, but not limited | | | |
| | | | to, immune disorders involving B-cells). (The Daudi cell line | | | |
| | | | is a human B lymphoblast cell line available through the | | | |
| | | | ATCC as cell line number CCL-213). | | | |
| 76 | HTEEW69 | Immune | Highly preferred indications include immunological disorders | HEK293 | TNF | gb\|AJ270944\|HSA27094 |
| | | | such as described herein under the heading “Immune Activity” | | | |
| | | | and/or “Blood-Related Disorders” (particularly including, | | | |
| | | | but not limited to, immune disorders involving epithelial cells | | | |
| | | | or the renal system). Highly preferred embodiments of the | | | |
| | | | invention include methods of preventing, detecting, | | | |
| | | | diagnosing, treating and/or ameliorating disorders of the | | | |
| | | | immune system (particularly including, but not limited to, | | | |
| | | | immune disorders involving epithelial cells or the renal | | | |
| | | | system). (The 293 cell line is a human embryonal kidney | | | |
| | | | epithelial cell line available through the ATCC as cell line | | | |
| | | | number CRL-1573). | | | |
| 76 | HTEEW69 | Immune | Highly preferred indications include immunological disorders | Liver | ICAM | gb\|X06990\|HSICAM1 |
| | | | such as described herein under the heading “Immune Activity” | | | |
| | | | and/or “Blood-Related Disorders” (particularly including, | | | |
| | | | but not limited to, immune disorders involving cells of the | | | |
| | | | hepatic system). Highly preferred embodiments of the | | | |
| | | | invention include methods of preventing, detecting, | | | |
| | | | diagnosing, treating and/or ameliorating disorders of the | | | |
| | | | immune system (particularly including, but not limited to, | | | |
| | | | immune disorders involving cells of the hepatic system). | | | |
| 76 | HTEEW69 | Immune | Highly preferred indications include immunological disorders | NHDF | CIS3 | gb\|AB006967\|AB006967 |
| | | | such as described herein under the heading “Immune Activity” | | TNF | gb\|AJ270944\|HSA27094 |
| | | | and/or “Blood-Related Disorders” (particularly including, | | | |
| | | | but not limited to, immune disorders involving the skin). | | | |
| | | | Highly preferred embodiments of the invention include | | | |
| | | | methods of preventing, detecting, diagnosing, treating and/or | | | |
| | | | ameliorating disorders of the immune system (particularly | | | |
| | | | including, but not limited to, immune disorders involving | | | |
| | | | the skin). (NHDF cells are normal human dermal fibroblasts). | | | |
| 76 | HTEEW69 | Immune | Highly preferred indications include immunological disorders | SK-N-MC | TNF | gb\|AJ270944\|HSA27094 |
| | | | such as described herein under the heading “Immune Activity” | neuroblastoma | VCAM | gb\|A30922\|A30922 |
| | | | and/or “Blood-Related Disorders” (particularly including, | | | |
| | | | but not limited to, immune disorders involving the central | | | |
| | | | nervous system). Highly preferred embodiments of the | | | |
| | | | invention include methods of preventing, detecting, | | | |
| | | | diagnosing, treating and/or ameliorating disorders of | | | |
| | | | the immune system (particularly including, but not limited | | | |
| | | | to, immune disorders involving the central nervous sytem). | | | |
| | | | (The SK-N-MC neuroblastoma cell line is a cell line derived | | | |
| | | | from human brain tissue and is available through the ATCC | | | |
| | | | as cell line number HTB-10). | | | |
| 76 | HTEEW69 | Immune | Highly preferred indications include immunological disorders | THP1 | CD25 | gb\|X03137\|HSIL2RG7 |
| | | | such as described herein under the heading “Immune Activity” | | CD40 | gb\|AJ300189\|HSA30018 |
| | | | and/or “Blood-Related Disorders” (particularly including, | | GATA3 | gb\|X55037\|HSGATA3 |
| | | | but not limited to, immune disorders involving monocytes). | | LTBR | gb\|AK027080\|AK027080 |
| | | | Highly preferred embodiments of the invention include | | Rag1 | gb\|M29474\|HUMRAG1 |
| | | | methods of preventing, detecting, diagnosing, treating | | | |
| | | | and/or ameliorating disorders of the immune system | | | |
| | | | (particularly including, but not limited to, immune | | | |
| | | | disorders involving monocytes). (The THP1 cell line is | | | |
| | | | a human monocyte cell line available through the ATCC | | | |
| | | | as cell line number TIB-202). | | | |
| 76 | HTEEW69 | Immune | Highly preferred indications include immunological disorders | U937 | IL1B | gb\|X02532\|HSIL1BR |
| | | | such as described herein under the heading “Immune Activity” | | TNF | gb\|AJ270944\|HSA27094 |
| | | | and/or “Blood-Related Disorders” (particularly including, | | | |
| | | | but not limited to, immune disorders involving monocytes). | | | |
| | | | Highly preferred embodiments of the invention include | | | |
| | | | methods of preventing, detecting, diagnosing, treating | | | |
| | | | and/or ameliorating disorders of the immune system | | | |
| | | | (particularly including, but not limited to, immune | | | |
| | | | disorders involving monocytes). (The U937 cell line | | | |
| | | | is a human monocyte cell line available through the ATCC | | | |
| | | | as cell line number CRL-1593.2). | | | |

[0116] Table 2 further characterizes certain encoded polypeptides of the invention, by providing the results of comparisons to protein and protein family databases. The first column provides a unique clone identifier, “Clone ID NO:”, corresponding to a cDNA clone disclosed in Table 1A and/or Table 1B. The second column provides the unique contig identifier, “Contig ID:” which allows correlation with the information in Table 1B. The third column provides the sequence identifier, “SEQ ID NO:”, for the contig polynucleotide sequences. The fourth column provides the analysis method by which the homology/identity disclosed in the Table was determined. The fifth column provides a description of the PFAM/NR hit identified by each analysis. Column six provides the accession number of the PFAM/NR hit disclosed in the fifth column. Column seven, score/percent identity, provides a quality score or the percent identity, of the hit disclosed in column five. Comparisons were made between polypeptides encoded by polynucleotides of the invention and a non-redundant protein database (herein referred to as “NR”), or a database of protein families (herein referred to as “PFAM”), as described below.

[0117] The NR database, which comprises the NBRF PIR database, the NCBI GenPept database, and the SIB SwissProt and TrEMBL databases, was made non-redundant using the computer program nrdb2 (Warren Gish, Washington University in Saint Louis). Each of the polynucleotides shown in Table 1B, column 3 (e.g., SEQ ID NO:X or the ‘Query’ sequence) was used to search against the NR database. The computer program BLASTX was used to compare a 6-frame translation of the Query sequence to the NR database (for information about the BLASTX algorithm please see Altshul et al., J. Mol. Biol. 215:403-410 (1990), and Gish and States, Nat. Genet. 3:266-272 (1993). A description of the sequence that is most similar to the Query sequence (the highest scoring ‘Subject’) is shown in column five of Table 2 and the database accession number for that sequence is provided in column six. The highest scoring ‘Subject’ is reported in Table 2 if (a) the estimated probability that the match occurred by chance alone is less than 1.0e-07, and (b) the match was not to a known repetitive element. BLASTX returns alignments of short polypeptide segments of the Query and Subject sequences that share a high degree of similarity; these segments are known as High-Scoring Segment Pairs or HSPs. Table 2 reports the degree of similarity between the Query and the Subject for each HSP as a percent identity in Column 7. The percent identity is determined by dividing the number of exact matches between the two aligned sequences in the HSP, dividing by the number of Query amino acids in the HSP and multiplying by 100. The polynucleotides of SEQ ID NO:X which encode the polypeptide sequence that generates an HSP are delineated by columns 8 and 9 of Table 2.

[0118] The PFAM database, PFAM version 2.1, (Sonnhammer, Nucl. Acids Res., 26:320-322, 1998)) consists of a series of multiple sequence alignments; one alignment for each protein family. Each multiple sequence alignment is converted into a probability model called a Hidden Markov Model, or HMM, that represents the position-specific variation among the sequences that make up the multiple sequence alignment (see, e.g., Durbin, et al., Biological sequence analysis: probabilistic models of proteins and nucleic acids, Cambridge University Press, 1998 for the theory of HMMs). The program HMMER version 1.8 (Sean Eddy, Washington University in Saint Louis) was used to compare the predicted protein sequence for each Query sequence (SEQ ID NO:Y in Table 1B) to each of the HMMs derived from PFAM version 2.1. A HMM derived from PFAM version 2.1 was said to be a significant match to a polypeptide of the invention if the score returned by HMMER 1.8 was greater than 0.8 times the HMMER 1.8 score obtained with the most distantly related known member of that protein family. The description of the PFAM family which shares a significant match with a polypeptide of the invention is listed in column 5 of Table 2, and the database accession number of the PFAM hit is provided in column 6. Column 7 provides the score returned by HMMER version 1.8 for the alignment. Columns 8 and 9 delineate the polynucleotides of SEQ ID NO:X which encode the polypeptide sequence which show a significant match to a PFAM protein family.

[0119] As mentioned, columns 8 and 9 in Table 2, “NT From” and “NT To”, delineate the polynucleotides of “SEQ ID NO:X” that encode a polypeptide having a significant match to the PFAM/NR database as disclosed in the fifth column. In one embodiment, the invention provides a protein comprising, or alternatively consisting of, a polypeptide encoded by the polynucleotides of SEQ ID NO:X delineated in columns 8 and 9 of Table 2. Also provided are polynucleotides encoding such proteins, and the complementary strand thereto.

[0120] The nucleotide sequence SEQ ID NO:X and the translated SEQ ID NO:Y are sufficiently accurate and otherwise suitable for a variety of uses well known in the art and described further below. For instance, the nucleotide sequences of SEQ ID NO:X are useful for designing nucleic acid hybridization probes that will detect nucleic acid sequences contained in SEQ ID NO:X or the cDNA contained in ATCC Deposit No: Z. These probes will also hybridize to nucleic acid molecules in biological samples, thereby enabling immediate applications in chromosome mapping, linkage analysis, tissue identification and/or typing, and a variety of forensic and diagnostic methods of the invention. Similarly, polypeptides identified from SEQ ID NO:Y may be used to generate antibodies which bind specifically to these polypeptides, or fragments thereof, and/or to the polypeptides encoded by the cDNA clones identified in, for example, Table 1A and/or 1B.

[0121] Nevertheless, DNA sequences generated by sequencing reactions can contain sequencing errors. The errors exist as misidentified nucleotides, or as insertions or deletions of nucleotides in the generated DNA sequence. The erroneously inserted or deleted nucleotides cause frame shifts in the reading frames of the predicted amino acid sequence. In these cases, the predicted amino acid sequence diverges from the actual amino acid sequence, even though the generated DNA sequence may be greater than 99.9% identical to the actual DNA sequence (for example, one base insertion or deletion in an open reading frame of over 1000 bases).

[0122] Accordingly, for those applications requiring precision in the nucleotide sequence or the amino acid sequence, the present invention provides not only the generated nucleotide sequence identified as SEQ ID NO:X, and a predicted translated amino acid sequence identified as SEQ ID NO:Y, but also a sample of plasmid DNA containing cDNA ATCC Deposit No: Z (e.g., as set forth in columns 2 and 3 of Table 1A and/or as set forth, for example, in Table 1B, 6, and 7). The nucleotide sequence of each deposited clone can readily be determined by sequencing the deposited clone in accordance with known methods. Further, techniques known in the art can be used to verify the nucleotide sequences of SEQ ID NO:X. The predicted amino acid sequence can then be verified from such deposits. Moreover, the amino acid sequence of the protein encoded by a particular clone can also be directly determined by peptide sequencing or by expressing the protein in a suitable host cell containing the deposited human cDNA, collecting the protein, and determining its sequence.

TABLE 2

| | | SEQ | | | PFam/NR | Score/ | | |
|---|---|---|---|---|---|---|---|---|
| cDNA | Contig | ID | Analysis | | Accession | Percent | NT | NT |
| Clone ID | ID: | NO: X | Method | PFam/NR Description | Number | Identity | From | To |
| HADMB15 | 847116 | 15 | WUblastx.64 | (Q9BVH1) SIMILAR TO DLXIN-1. | Q9BVH1 | 100% | 8 | 109 |
| HAGCC87 | 638587 | 17 | WUblastx.64 | (Q9BGW3) HYPOTHETICAL 13.5 KDA PROTEIN. | Q9BGW3 | 65% | 992 | 1105 |
| | | | | | | 36% | 54 | 116 |
| | | | | | | 57% | 801 | 980 |
| HAGHN57 | 773286 | 18 | WUblastx.64 | (O60416) WUGSC: H_RG276O03.2 PROTEIN. | O60416 | 98% | 65 | 1444 |
| HAQCE11 | 633730 | 22 | WUblastx.64 | (Q24333) ELASTIN LIKE PROTEIN (FRAGMENT). | Q24333 | 95% | 61 | 132 |
| HBAGD86 | 838799 | 23 | WUblastx.64 | (Q14287) HYPOTHETICAL PROTEIN | Q14287 | 37% | 801 | 559 |
| | | | | (FRAGMENT). | | | | |
| HBGBC29 | 691473 | 24 | WUblastx.64 | (O60513) BETA-1,4-GALACTOSYLTRANSFERASE | B4G4_HUMAN | 61% | 1 | 78 |
| | | | | 4 (EC 2.4.1.—) (BET | | 98% | 65 | 1021 |
| HBJAB02 | 837309 | 25 | WUblastx.64 | (Q9NXT6) CDNA FLJ20062 FIS, CLONE COL01508. | Q9NXT6 | 70% | 2 | 1210 |
| HBMUH74 | 866160 | 26 | WUblastx.64 | (Q9NVW8) CDNA FLJ10462 FIS, CLONE | Q9NVW8 | 100% | 11 | 427 |
| | | | | NT2RP1001494, WEAKLY SIMILAR TO MAL | | | | |
| HBNAX40 | 834801 | 27 | WUblastx.64 | (Q9H2K2) TANKYRASE-LIKE PROTEIN | Q9H2K2 | 100% | 1 | 201 |
| | | | | (TANKYRASE 2). | | 100% | 221 | 481 |
| HBXCX15 | 637542 | 28 | WUblastx.64 | (Q9GMX5) HYPOTHETICAL 12.9 KDA PROTEIN. | Q9GMX5 | 41% | 726 | 827 |
| | | | | | | 52% | 578 | 730 |
| HCDBO32 | 831942 | 29 | WUblastx.64 | (AAH17472) Hypothetical 21.3 kDa protein. | AAH17472 | 69% | 643 | 801 |
| | | | | | | 100% | 239 | 583 |
| HCEFZ82 | 831745 | 31 | WUblastx.64 | (Q9BV23) SIMILAR TO LIPASE PROTEIN. | Q9BV23 | 95% | 594 | 782 |
| | | | | | | 100% | 17 | 604 |
| HCUCF89 | 637986 | 32 | WUblastx.64 | (Q9P147) PRO2822. | Q9P147 | 100% | 421 | 398 |
| | | | | | | 82% | 494 | 426 |
| HDPD172 | 897277 | 35 | WUblastx.64 | adult-specific brush border protein - rabbit | pir\|C45665\|C45665 | 64% | 180 | 230 |
| | | | | | | 83% | 11 | 100 |
| HDPIE44 | 899328 | 37 | WUblastx.64 | (Q9D666) 4632417G13RIK PROTEIN. | Q9D666 | 62% | 102 | 2453 |
| HDPIU94 | 813352 | 38 | WUblastx.64 | (Q9BVF7) SIMILAR TO HYPOTHETICAL | Q9BVF7 | 99% | 63 | 1703 |
| | | | | PROTEIN FLJ10422. | | | | |
| HE6CS65 | 762960 | 41 | WUblastx.64 | (Q9H7C6) CDNA: FLJ21047 FIS, CLONE CAS00253. | Q9H7C6 | 98% | 938 | 1378 |
| HE8BQ49 | 589443 | 42 | WUblastx.64 | hypothetical protein - human transposon MER37 | pir\|S72482\|S72482 | 75% | 343 | 474 |
| | | | | | | 64% | 105 | 248 |
| HE9CY05 | 834826 | 43 | WUblastx.64 | (Q9CX63) 6030468B19RIK PROTEIN. | Q9CX63 | 48% | 434 | 742 |
| | | | | | | 57% | 55 | 426 |
| HEAAW94 | 847340 | 44 | WUblastx.64 | (Q9UEV9) ACTIN-BINDING PROTEIN HOMOLOG | Q9UEV9 | 94% | 285 | 890 |
| | | | | ABP-278. | | | | |
| HEBFR46 | 847064 | 45 | WUblastx.64 | (Q9NX85) CDNA FLJ20378 FIS, CLONE KAIA0536. | Q9NX85 | 80% | 1111 | 1022 |
| | | | | | | 84% | 1265 | 1110 |
| HFEBO17 | 852218 | 48 | WUblastx.64 | (BAB55130) CDNA FLJ14559 fis, clone | BAB55130 | 100% | 523 | 624 |
| | | | | NT2RM2001998. | | 91% | 606 | 809 |
| HFIJA29 | 839206 | 49 | WUblastx.64 | (Q9UHT1) PRO1902 PROTEIN. | Q9UHT1 | 46% | 889 | 806 |
| | | | | | | 59% | 1026 | 880 |
| HGBER72 | 826710 | 51 | WUblastx.64 | (Q9H387) PRO2550. | Q9H387 | 71% | 1061 | 969 |
| | | | | | | 78% | 1104 | 1063 |
| | | | | | | 77% | 1237 | 1103 |
| HHSDI53 | 862028 | 55 | WUblastx.64 | (Q9H387) PRO2550. | Q9H387 | 70% | 1108 | 935 |
| | | | | | | 71% | 1241 | 1107 |
| | | | | | | 75% | 1276 | 1241 |
| HISBA38 | 561711 | 56 | WUblastx.64 | (Q9H387) PRO2550. | Q9H387 | 53% | 919 | 836 |
| | | | | | | 53% | 996 | 907 |
| | | | | | | 51% | 842 | 687 |
| HKABU43 | 838573 | 58 | WUblastx.64 | (AAH03633) Translocase of outer mitochondrial | AAH03633 | 100% | 33 | 62 |
| | | | | membr | | 92% | 26 | 1597 |
| HLYGY91 | 658703 | 60 | WUblastx.64 | (Q9H8N0) CDNA FLJ13386 FIS, CLONE | Q9H8N0 | 94% | 221 | 391 |
| | | | | PLACE1001104, WEAKLY SIMILAR TO MYO | | | | |
| HMWJF53 | 758158 | 64 | WUblastx.64 | (Q9GZU7) NUCLEAR LIM INTERACTOR- | Q9GZU7 | 91% | 3 | 170 |
| | | | | INTERACTING FACTOR. | | 100% | 154 | 720 |
| HNECL22 | 799541 | 65 | WUblastx.64 | (Q9P0J2) MITOCHONDRIAL SOLUTE CARRIER. | Q9P0J2 | 94% | 1771 | 2331 |
| HNFAC50 | 815676 | 66 | WUblastx.64 | (Q9H286) SEROLOGICALLY DEFINED BREAST | Q9H286 | 100% | 425 | 282 |
| | | | | CANCER ANTIGEN NY-BR-20 (FRAGME | | | | |
| HNHCT47 | 634691 | 71 | WUblastx.64 | (Q9H728) CDNA: FLJ21463 FIS, CLONE COL04765. | Q9H728 | 46% | 434 | 396 |
| | | | | | | 56% | 621 | 448 |
| HNHKI74 | 777856 | 72 | WUblastx.64 | (Q9BGX7) HYPOTHETICAL 13.0 KDA PROTEIN. | Q9BGX7 | 64% | 350 | 541 |
| HOUDE92 | 580866 | 74 | WUblastx.64 | (Q9HBT2) HYPOTHETICAL 17.2 KDA PROTEIN. | Q9HBT2 | 96% | 21 | 245 |
| HOUFS04 | 771564 | 75 | WUblastx.64 | (Q9VN45) CG12001 PROTEIN. | Q9VN45 | 32% | 1362 | 1982 |
| | | | | | | 39% | 915 | 1106 |
| | | | | | | 26% | 141 | 380 |
| HOUHI25 | 888279 | 76 | WUblastx.64 | (O95003) WUGSC: H_DJ0593H12.2 PROTEIN. | O95003 | 94% | 73 | 783 |
| HPCAL26 | 762822 | 77 | WUblastx.64 | (O95084) SERINE PROTEASE (HYPOTHETICAL | O95084 | 98% | 398 | 640 |
| | | | | 43.0 KDA PROTEIN) (PROTEASE, S | | 76% | 135 | 497 |
| HSAVA08 | 580870 | 79 | WUblastx.64 | (Q9BGW3) HYPOTHETICAL 13.5 KDA PROTEIN. | Q9BGW3 | 57% | 949 | 896 |
| | | | | | | 42% | 926 | 792 |
| | | | | | | 63% | 796 | 764 |
| | | | | | | 66% | 1059 | 934 |
| HSHAX04 | 812178 | 80 | WUblastx.64 | peptidylprolyl isomerase (EC 5.2.1.8) A - human | pir\|S66681\|S66681 | 96% | 14 | 916 |
| HSRFD18 | 840771 | 83 | WUblastx.64 | (Q9H941) CDNA FLJ13033 FIS, CLONE | Q9H941 | 100% | 437 | 559 |
| | | | | NT2RP3001126. | | | | |
| HSWBE76 | 751308 | 84 | WUblastx.64 | (Q9NW15) CDNA FLJ10375 FIS, CLONE | Q9NW15 | 100% | 126 | 266 |
| | | | | NT2RM2001950. | | | | |
| HTEEW69 | 764835 | 86 | WUblastx.64 | (Q9Z1H7) GSG1. | Q9Z1H7 | 65% | 850 | 927 |
| | | | | | | 85% | 707 | 769 |
| | | | | | | 50% | 519 | 662 |
| | | | | | | 66% | 908 | 943 |
| | | | | | | 65% | 182 | 544 |
| HTEMQ17 | 840387 | 88 | WUblastx.64 | (Q9D4P8) 4930579G24RIK PROTEIN. | Q9D4P8 | 90% | 120 | 359 |
| HTGBK95 | 834490 | 89 | WUblastx.64 | (Q9GMX5) HYPOTHETICAL 12.9 KDA PROTEIN. | Q9GMX5 | 66% | 126 | 55 |
| | | | | | | 70% | 235 | 116 |
| HTLEM16 | 779133 | 90 | WUblastx.64 | (O95638) WW DOMAIN BINDING PROTEIN-2. | O95638 | 92% | 50 | 541 |
| | | | | | | 28% | 987 | 1142 |
| | | | | | | 48% | 617 | 841 |
| HTNBK13 | 831967 | 91 | WUblastx.64 | (Q9Y3M2) HYPOTHETICAL 14.5 KDA PROTEIN. | Q9Y3M2 | 81% | 123 | 500 |
| HTPDU17 | 840596 | 93 | WUblastx.64 | (Q9NW00) CDNA FLJ10404 FIS, CLONE | Q9NW00 | 80% | 553 | 1308 |
| | | | | NT2RM4000486. | | 64% | 1143 | 1664 |
| HTTDN24 | 766485 | 94 | WUblastx.64 | (Q9BVN5) HYPOTHETICAL 120.6 KDA PROTEIN. | Q9BVN5 | 95% | 628 | 1725 |
| | | | | | | 32% | 937 | 1593 |
| | | | | | | 95% | 3 | 629 |
| | | | | | | 32% | 1114 | 1596 |
| HTTEE41 | 840950 | 95 | WUblastx.64 | (P78371) T-COMPLEX PROTEIN 1, BETA | TCPB_HUMAN | 98% | 92 | 1696 |
| | | | | SUBUNIT (TCP-1-BETA) (CC | | | | |
| HTXJD85 | 840391 | 96 | WUblastx.64 | (Q9HAD8) CDNA FLJ11786 FIS, CLONE | Q9HAD8 | 52% | 1093 | 818 |
| | | | | HEMBA1006036. | | | | |
| HUVDJ48 | 564853 | 97 | WUblastx.64 | SHORT ISOFORM OF Q9P2N4 | sp_vs\|Q9P2N4- | 92% | 1510 | 1668 |
| | | | | | 01\|Q9P2N4 | | | |
| HWBBU75 | 780360 | 98 | WUblastx.64 | (Q9R189) MUNC13-4 PROTEIN. | Q9R189 | 82% | 1454 | 2362 |
| | | | | | | 73% | 913 | 1434 |
| | | | | | | 80% | 194 | 952 |
| | | | | | | 62% | 2229 | 2729 |
| | | | | | | 31% | 1586 | 1711 |
| | | | | | | 34% | 401 | 532 |
| HWHPB78 | 740778 | 99 | WUblastx.64 | (Q9BUK4) SIMILAR TO HYPOTHETICAL | Q9BUK4 | 61% | 360 | 614 |
| | | | | PROTEIN FLJ10709. | | 100% | 677 | 817 |
| HWLGP26 | 834770 | 101 | WUblastx.64 | (Q9NP87) DNA POLYMERASE MU. | Q9NP87 | 93% | 674 | 760 |
| | | | | | | 100% | 269 | 298 |
| | | | | | | 94% | 295 | 465 |
| | | | | | | 87% | 432 | 623 |
| | | | | | | 100% | 3 | 254 |
| HILCA24 | 869856 | 102 | WUblastx.64 | (Q9NUU6) CDNA FLJ11127 FIS, CLONE | Q9NUU6 | 95% | 104 | 1171 |
| | | | | PLACE1006225. | | | | |
| HILCA24 | 782450 | 108 | WUblastx.64 | (Q9NUU6) CDNA FLJ11127 FIS, CLONE | Q9NUU6 | 73% | 103 | 159 |
| | | | | PLACE1006225. | | 100% | 168 | 1169 |
| HE2CA60 | 888705 | 103 | WUblastx.64 | (O95232) OKADAIC ACID-INDUCIBLE | OA48_HUMAN | 98% | 1098 | 1265 |
| | | | | PHOSPHOPROTEIN OA48-18. | | | | |
| HPWTF23 | 844775 | 104 | HMMER | PFAM: TSC-22/dip/bun family | PF01166 | 146.4 | 442 | 621 |
| | | | 2.1.1 | | | | | |
| | | | WUblastx.64 | (Q99576) GLUCOCORTICOID-INDUCED LEUCINE | GILZ_HUMAN | 94% | 271 | 672 |
| | | | | ZIPPER PROTEIN (DEL | | | | |
| HPWTF23 | 843700 | 110 | HMMER | PFAM: TSC-22/dip/bun family | PF01166 | 146.4 | 442 | 621 |
| | | | 2.1.1 | | | | | |
| | | | WUblastx.64 | (Q99576) GLUCOCORTICOID-INDUCED LEUCINE | GILZ_HUMAN | 94% | 271 | 672 |
| | | | | ZIPPER PROTEIN (DEL | | | | |
| HEQBJ01 | 876546 | 106 | WUblastx.64 | (Q9LVQ7) ZINC FINGER PROTEIN. | Q9LVQ7 | 34% | 424 | 849 |
| HEQBJ01 | 861786 | 113 | WUblastx.64 | (Q9LVQ7) ZINC FINGER PROTEIN. | Q9LVQ7 | 34% | 424 | 849 |

RACE Protocol for Recovery of Full-Length Genes

[0123] Partial cDNA clones can be made full-length by utilizing the rapid amplification of cDNA ends (RACE) procedure described in Frohman, M. A., et al., Proc. Nat'l. Acad. Sci. USA, 85:8998-9002 (1988). A cDNA clone missing either the 5′ or 3′ end can be reconstructed to include the absent base pairs extending to the translational start or stop codon, respectively. In some cases, cDNAs are missing the start codon of translation, therefor. The following briefly describes a modification of this original 5′ RACE procedure. Poly A+ or total RNA is reverse transcribed with Superscript II (Gibco/BRL) and an antisense or complementary primer specific to the cDNA sequence. The primer is removed from the reaction with a Microcon Concentrator (Amicon). The first-strand cDNA is then tailed with dATP and terminal deoxynucleotide transferase (Gibco/BRL). Thus, an anchor sequence is produced which is needed for PCR amplification. The second strand is synthesized from the dA-tail in PCR buffer, Taq DNA polymerase (Perkin-Elmer Cetus), an oligo-dT primer containing three adjacent restriction sites (XhoI, SalI and ClaI) at the 5′ end and a primer containing just these restriction sites. This double-stranded cDNA is PCR amplified for 40 cycles with the same primers as well as a nested cDNA-specific antisense primer. The PCR products are size-separated on an ethidium bromide-agarose gel and the region of gel containing cDNA products the predicted size of missing protein-coding DNA is removed. cDNA is purified from the agarose with the Magic PCR Prep kit (Promega), restriction digested with XhoI or SalI, and ligated to a plasmid such as pBluescript SKII (Stratagene) at XhoI and EcoRV sites. This DNA is transformed into bacteria and the plasmid clones sequenced to identify the correct protein-coding inserts. Correct 5′ ends are confirmed by comparing this sequence with the putatively identified homologue and overlap with the partial cDNA clone. Similar methods known in the art and/or commercial kits are used to amplify and recover 3′ ends.

[0124] Several quality-controlled kits are commercially available for purchase. Similar reagents and methods to those above are supplied in kit form from Gibco/BRL for both 5′ and 3′ RACE for recovery of full-length genes. A second kit is available from Clontech, which is a modification of a related technique, SLIC (single-stranded ligation to single-stranded cDNA), developed by Dumas et al., Nucleic Acids Res., 19:5227-32 (1991). The major differences in procedure are that the RNA is alkaline hydrolyzed after reverse transcription and RNA ligase is used to join a restriction site-containing anchor primer to the first-strand cDNA. This obviates the necessity for the dA-tailing reaction that results in a polyT stretch that is difficult to sequence past.

[0125] An alternative to generating 5′ or 3′ cDNA from RNA is to use cDNA library double-stranded DNA. An asymmetric PCR-amplified antisense cDNA strand is synthesized with an antisense cDNA-specific primer and a plasmid-anchored primer. These primers are removed and a symmetric PCR reaction is performed with a nested cDNA-specific antisense primer and the plasmid-anchored primer.

RNA Ligase Protocol for Generating the 5′ or 3′End Sequences to Obtain Full Length Genes

[0126] Once a gene of interest is identified, several methods are available for the identification of the 5′ or 3′ portions of the gene that may not be present in the original cDNA plasmid. These methods include, but are not limited to, filter probing, clone enrichment using specific probes and protocols similar and identical to 5′ and 3′ RACE. While the full-length gene may be present in the library and can be identified by probing, a useful method for generating the 5′ or 3′ end is to use the existing sequence information from the original cDNA to generate the missing information. A method similar to 5′ RACE is available for generating the missing 5′ end of a desired full-length gene. (This method was published by Fromont-Racine et al., Nucleic Acids Res., 21(7):1683-1684 (1993)). Briefly, a specific RNA oligonucleotide is ligated to the 5′ ends of a population of RNA presumably containing full-length gene RNA transcript and a primer set containing a primer specific to the ligated RNA oligonucleotide and a primer specific to a known sequence of the gene of interest, is used to PCR amplify the 5′ portion of the desired full length gene which may then be sequenced and used to generate the full length gene. This method starts with total RNA isolated from the desired source, poly A RNA may be used but is not a prerequisite for this procedure. The RNA preparation may then be treated with phosphatase if necessary to eliminate 5′ phosphate groups on degraded or damaged RNA, which may interfere with the later RNA ligase step. The phosphatase if used is then inactivated and the RNA is treated with tobacco acid pyrophosphatase in order to remove the cap structure present at the 5′ ends of messenger RNAs. This reaction leaves a 5′ phosphate group at the 5′ end of the cap cleaved RNA which can then be ligated to an RNA oligonucleotide using T4 RNA ligase. This modified RNA preparation can then be used as a template for first strand cDNA synthesis using a gene specific oligonucleotide. The first strand synthesis reaction can then be used as a template for PCR amplification of the desired 5′ end using a primer specific to the ligated RNA oligonucleotide and a primer specific to the known sequence of the gene of interest. The resultant product is then sequenced and analyzed to confirm that the 5′ end sequence belongs to the relevant gene.

[0127] The present invention also relates to vectors or plasmids, which include such DNA sequences, as well as the use of the DNA sequences. The material deposited with the ATCC (e.g., as described in columns 2 and 3 of Table 1A, and/or as set forth in Table 1B, Table 6, or Table 7) is a mixture of cDNA clones derived from a variety of human tissue and cloned in either a plasmid vector or a phage vector, as described, for example, in Table 1A and Table 7. These deposits are referred to as “the deposits” herein. The tissues from which some of the clones were derived are listed in Table 7, and the vector in which the corresponding cDNA is contained is also indicated in Table 7. The deposited material includes cDNA clones corresponding to SEQ ID NO:X described, for example, in Table 1A and/or Table 1B (ATCC Deposit No: Z). A clone which is isolatable from the ATCC Deposits by use of a sequence listed as SEQ ID NO:X, may include the entire coding region of a human gene or in other cases such clone may include a substantial portion of the coding region of a human gene. Furthermore, although the sequence listing may in some instances list only a portion of the DNA sequence in a clone included in the ATCC Deposits, it is well within the ability of one skilled in the art to sequence the DNA included in a clone contained in the ATCC Deposits by use of a sequence (or portion thereof) described in, for example Tables 1A and/or Table 1B or Table 2, by procedures hereinafter further described, and others apparent to those skilled in the art.

[0128] Also provided in Table 1A and Table 7 is the name of the vector which contains the cDNA clone. Each vector is routinely used in the art. The following additional information is provided for convenience.

[0129] Vectors Lambda Zap (U.S. Pat. Nos. 5,128,256 and 5,286,636), Uni-Zap XR (U.S. Pat. Nos. 5,128,256 and 5,286,636), Zap Express (U.S. Pat. Nos. 5,128,256 and 5,286,636), pBluescript (pBS) (Short, J. M. et al., Nucleic Acids Res. 16:7583-7600 (1988); Alting-Mees, M. A. and Short, J. M., Nucleic Acids Res. 17:9494 (1989)) and pBK (Alting-Mees, M. A. et al., Strategies 5:58-61 (1992)) are commercially available from Stratagene Cloning Systems, Inc., 11011 N. Torrey Pines Road, La Jolla, Calif., 92037. pBS contains an ampicillin resistance gene and pBK contains a neomycin resistance gene. Phagemid pBS may be excised from the Lambda Zap and Uni-Zap XR vectors, and phagemid pBK may be excised from the Zap Express vector. Both phagemids may be transformed into E. coli strain XL-1 Blue, also available from Stratagene.

[0130] Vectors pSport1, pCMVSport 1.0, pCMVSport 2.0 and pCMVSport 3.0, were obtained from Life Technologies, Inc., P.O. Box 6009, Gaithersburg, Md. 20897. All Sport vectors contain an ampicillin resistance gene and may be transformed into E. coli strain DH10B, also available from Life Technologies. See, for instance, Gruber, C. E., et al., Focus 15:59- (1993). Vector lafmid BA (Bento Soares, Columbia University, New York, N.Y.) contains an ampicillin resistance gene and can be transformed into E. coli strain XL-1 Blue. Vector pCR®2.1, which is available from Invitrogen, 1600 Faraday Avenue, Carlsbad, Calif. 92008, contains an ampicillin resistance gene and may be transformed into E. coli strain DH10B, available from Life Technologies. See, for instance, Clark, J. M., Nuc. Acids Res. 16:9677-9686 (1988) and Mead, D. et al., Bio/Technology 9: (1991).

[0131] The present invention also relates to the genes corresponding to SEQ ID NO:X, SEQ ID NO:Y, and/or the deposited clone (ATCC Deposit No: Z). The corresponding gene can be isolated in accordance with known methods using the sequence information disclosed herein. Such methods include preparing probes or primers from the disclosed sequence and identifying or amplifying the corresponding gene from appropriate sources of genomic material.

[0132] Also provided in the present invention are allelic variants, orthologs, and/or species homologs. Procedures known in the art can be used to obtain full-length genes, allelic variants, splice variants, full-length coding portions, orthologs, and/or species homologs of genes corresponding to SEQ ID NO:X or the complement thereof, polypeptides encoded by genes corresponding to SEQ ID NO:X or the complement thereof, and/or the cDNA contained in ATCC Deposit No: Z, using information from the sequences disclosed herein or the clones deposited with the ATCC. For example, allelic variants and/or species homologs may be isolated and identified by making suitable probes or primers from the sequences provided herein and screening a suitable nucleic acid source for allelic variants and/or the desired homologue.

[0133] The polypeptides of the invention can be prepared in any suitable manner. Such polypeptides include isolated naturally occurring polypeptides, recombinantly produced polypeptides, synthetically produced polypeptides, or polypeptides produced by a combination of these methods. Means for preparing such polypeptides are well understood in the art.

[0134] The polypeptides may be in the form of the secreted protein, including the mature form, or may be a part of a larger protein, such as a fusion protein (see below). It is often advantageous to include an additional amino acid sequence which contains secretory or leader sequences, pro-sequences, sequences which aid in purification, such as multiple histidine residues, or an additional sequence for stability during recombinant production.

[0135] The polypeptides of the present invention are preferably provided in an isolated form, and preferably are substantially purified. A recombinantly produced version of a polypeptide, including the secreted polypeptide, can be substantially purified using techniques described herein or otherwise known in the art, such as, for example, by the one-step method described in Smith and Johnson, Gene 67:31-40 (1988). Polypeptides of the invention also can be purified from natural, synthetic or recombinant sources using techniques described herein or otherwise known in the art, such as, for example, antibodies of the invention raised against the polypeptides of the present invention in methods which are well known in the art.

[0136] The present invention provides a polynucleotide comprising, or alternatively consisting of, the nucleic acid sequence of SEQ ID NO:X, and/or the cDNA sequence contained in ATCC Deposit No: Z. The present invention also provides a polypeptide comprising, or alternatively, consisting of, the polypeptide sequence of SEQ ID NO:Y, a polypeptide encoded by SEQ ID NO:X or a complement thereof, a polypeptide encoded by the cDNA contained in ATCC Deposit No: Z, and/or the polypeptide sequence encoded by a nucleotide sequence in SEQ ID NO:B as defined in column 6 of Table 1C. Polynucleotides encoding a polypeptide comprising, or alternatively consisting of the polypeptide sequence of SEQ ID NO:Y, a polypeptide encoded by SEQ ID NO:X, a polypeptide encoded by the cDNA contained in ATCC Deposit No: Z, and/or a polypeptide sequence encoded by a nucleotide sequence in SEQ ID NO:B as defined in column 6 of Table 1C are also encompassed by the invention. The present invention further encompasses a polynucleotide comprising, or alternatively consisting of, the complement of the nucleic acid sequence of SEQ ID NO:X, a nucleic acid sequence encoding a polypeptide encoded by the complement of the nucleic acid sequence of SEQ ID NO:X, and/or the cDNA contained in ATCC Deposit No: Z.

[0137] Moreover, representative examples of polynucleotides of the invention comprise, or alternatively consist of, one, two, three, four, five, six, seven, eight, nine, ten, or more of the sequences delineated in Table 1C column 6, or any combination thereof. Additional, representative examples of polynucleotides of the invention comprise, or alternatively consist of, one, two, three, four, five, six, seven, eight, nine, ten, or more of the complementary strand(s) of the sequences delineated in Table 1C column 6, or any combination thereof. In further embodiments, the above-described polynucleotides of the invention comprise, or alternatively consist of, sequences delineated in Table 1C, column 6, and have a nucleic acid sequence which is different from that of the BAC fragment having the sequence disclosed in SEQ ID NO:B (see Table 1C, column 5). In additional embodiments, the above-described polynucleotides of the invention comprise, or alternatively consist of, sequences delineated in Table 1C, column 6, and have a nucleic acid sequence which is different from that published for the BAC clone identified as BAC ID NO:A (see Table 1C, column 4). In additional embodiments, the above-described polynucleotides of the invention comprise, or alternatively consist of, sequences delineated in Table 1C, column 6, and have a nucleic acid sequence which is different from that contained in the BAC clone identified as BAC ID NO:A (see Table 1C, column 4). Polypeptides encoded by these polynucleotides, other polynucleotides that encode these polypeptides, and antibodies that bind these polypeptides are also encompassed by the invention. Additionally, fragments and variants of the above-described polynucleotides and polypeptides are also encompassed by the invention.

[0138] Further, representative examples of polynucleotides of the invention comprise, or alternatively consist of, one, two, three, four, five, six, seven, eight, nine, ten, or more of the sequences delineated in column 6 of Table 1C which correspond to the same Clone ID (see Table 1C, column 1), or any combination thereof. Additional, representative examples of polynucleotides of the invention comprise, or alternatively consist of, one, two, three, four, five, six, seven, eight, nine, ten, or more of the complementary strand(s) of the sequences delineated in column 6 of Table 1C which correspond to the same Clone ID (see Table 1C, column 1), or any combination thereof. In further embodiments, the above-described polynucleotides of the invention comprise, or alternatively consist of, sequences delineated in column 6 of Table 1C which correspond to the same Clone ID (see Table 1C, column 1) and have a nucleic acid sequence which is different from that of the BAC fragment having the sequence disclosed in SEQ ID NO:B (see Table 1C, column 5). In additional embodiments, the above-described polynucleotides of the invention comprise, or alternatively consist of, sequences delineated in column 6 of Table 1C which correspond to the same Clone ID (see Table 1C, column 1) and have a nucleic acid sequence which is different from that published for the BAC clone identified as BAC ID NO:A (see Table 1C, column 4). In additional embodiments, the above-described polynucleotides of the invention comprise, or alternatively consist of, sequences delineated in column 6 of Table 1C which correspond to the same Clone ID (see Table 1C, column 1) and have a nucleic acid sequence which is different from that contained in the BAC clone identified as BAC ID NO:A (see Table 1C, column 4). Polypeptides encoded by these polynucleotides, other polynucleotides that encode these polypeptides, and antibodies that bind these polypeptides are also encompassed by the invention. Additionally, fragments and variants of the above-described polynucleotides and polypeptides are also encompassed by the invention.

[0139] Further, representative examples of polynucleotides of the invention comprise, or alternatively consist of, one, two, three, four, five, six, seven, eight, nine, ten, or more of the sequences delineated in column 6 of Table 1C which correspond to the same contig sequence identifier SEQ ID NO:X (see Table 1C, column 2), or any combination thereof. Additional, representative examples of polynucleotides of the invention comprise, or alternatively consist of, one, two, three, four, five, six, seven, eight, nine, ten, or more of the complementary strand(s) of the sequences delineated in column 6 of Table 1C which correspond to the same contig sequence identifier SEQ ID NO:X (see Table 1C, column 2), or any combination thereof. In further embodiments, the above-described polynucleotides of the invention comprise, or alternatively consist of, sequences delineated in column 6 of Table 1C which correspond to the same contig sequence identifier SEQ ID NO:X (see Table 1C, column 2) and have a nucleic acid sequence which is different from that of the BAC fragment having the sequence disclosed in SEQ ID NO:B (see Table 1C, column 5). In additional embodiments, the above-described polynucleotides of the invention comprise, or alternatively consist of, sequences delineated in column 6 of Table 1C which correspond to the same contig sequence identifier SEQ ID NO:X (see Table 1C, column 2) and have a nucleic acid sequence which is different from that published for the BAC clone identified as BAC ID NO:A (see Table 1C, column 4). In additional embodiments, the above-described polynucleotides of the invention comprise, or alternatively consist of, sequences delineated in column 6 of Table 1C which correspond to the same contig sequence identifier SEQ ID NO:X (see Table 1C, column 2) and have a nucleic acid sequence which is different from that contained in the BAC clone identified as BAC ID NO:A (See Table 1C, column 4). Polypeptides encoded by these polynucleotides, other polynucleotides that encode these polypeptides, and antibodies that bind these polypeptides are also encompassed by the invention. Additionally, fragments and variants of the above-described polynucleotides and polypeptides are also encompassed by the invention.

[0140] Moreover, representative examples of polynucleotides of the invention comprise, or alternatively consist of, one, two, three, four, five, six, seven, eight, nine, ten, or more of the sequences delineated in the same row of Table 1C column 6, or any combination thereof. Additional, representative examples of polynucleotides of the invention comprise, or alternatively consist of, one, two, three, four, five, six, seven, eight, nine, ten, or more of the complementary strand(s) of the sequences delineated in the same row of Table 1C column 6, or any combination thereof. In preferred embodiments, the polynucleotides of the invention comprise, or alternatively consist of, one, two, three, four, five, six, seven, eight, nine, ten, or more of the complementary strand(s) of the sequences delineated in the same row of Table 1C column 6, wherein sequentially delineated sequences in the table (i.e. corresponding to those exons located closest to each other) are directly contiguous in a 5′ to 3′ orientation. In further embodiments, above-described polynucleotides of the invention comprise, or alternatively consist of, sequences delineated in the same row of Table 1C, column 6, and have a nucleic acid sequence which is different from that of the BAC fragment having the sequence disclosed in SEQ ID NO:B (see Table 1C, column 5). In additional embodiments, the above-described polynucleotides of the invention comprise, or alternatively consist of, sequences delineated in the same row of Table 1C, column 6, and have a nucleic acid sequence which is different from that published for the BAC clone identified as BAC ID NO:A (see Table 1C, column 4). In additional embodiments, the above-described polynucleotides of the invention comprise, or alternatively consist of, sequences delineated in the same row of Table 1C, column 6, and have a nucleic acid sequence which is different from that contained in the BAC clone identified as BAC ID NO:A (see Table 1C, column 4). Polypeptides encoded by these polynucleotides, other polynucleotides that encode these polypeptides, and antibodies that bind these polypeptides are also encompassed by the invention.

[0141] In additional specific embodiments, polynucleotides of the invention comprise, or alternatively consist of, one, two, three, four, five, six, seven, eight, nine, ten, or more of the sequences delineated in column 6 of Table 1C, and the polynucleotide sequence of SEQ ID NO:X (e.g., as defined in Table 1C, column 2) or fragments or variants thereof. Polypeptides encoded by these polynucleotides, other polynucleotides that encode these polypeptides, and antibodies that bind these polypeptides are also encompassed by the invention.

[0142] In additional specific embodiments, polynucleotides of the invention comprise, or alternatively consist of, one, two, three, four, five, six, seven, eight, nine, ten, or more of the sequences delineated in column 6 of Table 1C which correspond to the same Clone ID (see Table 1C, column 1), and the polynucleotide sequence of SEQ ID NO:X (e.g., as defined in Table 1A, Table 1B, or Table 1C) or fragments or variants thereof. In preferred embodiments, the delineated sequence(s) and polynucleotide sequence of SEQ ID NO:X correspond to the same Clone ID. Polypeptides encoded by these polynucleotides, other polynucleotides that encode these polypeptides, and antibodies that bind these polypeptides are also encompassed by the invention.

[0143] In further specific embodiments, polynucleotides of the invention comprise, or alternatively consist of, one, two, three, four, five, six, seven, eight, nine, ten, or more of the sequences delineated in the same row of column 6 of Table 1C, and the polynucleotide sequence of SEQ ID NO:X (e.g., as defined in Table 1A, Table 1B, or Table 1C) or fragments or variants thereof. In preferred embodiments, the delineated sequence(s) and polynucleotide sequence of SEQ ID NO:X correspond to the same row of column 6 of Table 1C. Polypeptides encoded by these polynucleotides, other polynucleotides that encode these polypeptides, and antibodies that bind these polypeptides are also encompassed by the invention.

[0144] In additional specific embodiments, polynucleotides of the invention comprise, or alternatively consist of a polynucleotide sequence in which the 3′ 10 polynucleotides of one of the sequences delineated in column 6 of Table 1C and the 5′ 10 polynucleotides of the sequence of SEQ ID NO:X are directly contiguous. Nucleic acids that hybridize to the complement of these 20 contiguous polynucleotides under stringent hybridization conditions or alternatively, under lower stringency conditions, are also encompassed by the invention. Polypeptides encoded by these polynucleotides and/or nucleic acids, other polynucleotides and/or nucleic acids that encode these polypeptides, and antibodies that bind these polypeptides are also encompassed by the invention. Additionally, fragments and variants of the above-described polynucleotides, nucleic acids, and polypeptides are also encompassed by the invention.

[0145] In additional specific embodiments, polynucleotides of the invention comprise, or alternatively consist of, a polynucleotide sequence in which the 3′ 10 polynucleotides of one of the sequences delineated in column 6 of Table 1C and the 5′ 10 polynucleotides of a fragment or variant of the sequence of SEQ ID NO:X are directly contiguous Nucleic acids which hybridize to the complement of these 20 contiguous polynucleotides under stringent hybridization conditions or alternatively, under lower stringency conditions, are also encompassed by the invention. Polypeptides encoded by these polynucleotides and/or nucleic acids, other polynucleotides and/or nucleic acids encoding these polypeptides, and antibodies that bind these polypeptides are also encompassed by the invention. Additionally, fragments and variants of the above-described polynucleotides, nucleic acids, and polypeptides are also encompassed by the invention.

[0146] In specific embodiments, polynucleotides of the invention comprise, or alternatively consist of, a polynucleotide sequence in which the 3′ 10 polynucleotides of the sequence of SEQ ID NO:X and the 5′ 10 polynucleotides of the sequence of one of the sequences delineated in column 6 of Table 1C are directly contiguous. Nucleic acids which hybridize to the complement of these 20 contiguous polynucleotides under stringent hybridization conditions or alternatively, under lower stringency conditions, are also encompassed by the invention. Polypeptides encoded by these polynucleotides and/or nucleic acids, other polynucleotides and/or nucleic acids encoding these polypeptides, and antibodies that bind these polypeptides are also encompassed by the invention. Additionally, fragments and variants of the above-described polynucleotides, nucleic acids, and polypeptides are also encompassed by the invention.

[0147] In specific embodiments, polynucleotides of the invention comprise, or alternatively consist of, a polynucleotide sequence in which the 3′ 10 polynucleotides of a fragment or variant of the sequence of SEQ ID NO:X and the 5′ 10 polynucleotides of the sequence of one of the sequences delineated in column 6 of Table 1C are directly contiguous. Nucleic acids that hybridize to the complement of these 20 contiguous polynucleotides under stringent hybridization conditions or alternatively, under lower stringency conditions, are also encompassed by the invention. Polypeptides encoded by these polynucleotides and/or nucleic acids, other polynucleotides and/or nucleic acids encoding these polypeptides, and antibodies that bind these polypeptides are also encompassed by the invention. Additionally, fragments and variants of the above-described polynucleotides, nucleic acids, and polypeptides, are also encompassed by the invention.

[0148] In further specific embodiments, polynucleotides of the invention comprise, or alternatively consist of, a polynucleotide sequence in which the 3′ 10 polynucleotides of one of the sequences delineated in column 6 of Table 1C and the 5′ 10 polynucleotides of another sequence in column 6 are directly contiguous. Nucleic acids that hybridize to the complement of these 20 contiguous polynucleotides under stringent hybridization conditions or alternatively, under lower stringency conditions, are also encompassed by the invention. Polypeptides encoded by these polynucleotides and/or nucleic acids, other polynucleotides and/or nucleic acids encoding these polypeptides, and antibodies that bind these polypeptides are also encompassed by the invention. Additionally, fragments and variants of the above-described polynucleotides, nucleic acids, and polypeptides are also encompassed by the invention.

[0149] In specific embodiments, polynucleotides of the invention comprise, or alternatively consist of, a polynucleotide sequence in which the 3′ 10 polynucleotides of one of the sequences delineated in column 6 of Table 1C and the 5′ 10 polynucleotides of another sequence in column 6 corresponding to the same Clone ID (see Table 1C, column 1) are directly contiguous. Nucleic acids that hybridize to the complement of these 20 lower stringency conditions, are also encompassed by the invention. Polypeptides encoded by these polynucleotides and/or nucleic acids, other polynucleotides and/or nucleic acids encoding these polypeptides, and antibodies that bind these polypeptides are also encompassed by the invention. Additionally, fragments and variants of the above-described polynucleotides, nucleic acids, and polypeptides are also encompassed by the invention.

[0150] In specific embodiments, polynucleotides of the invention comprise, or alternatively consist of, a polynucleotide sequence in which the 3′ 10 polynucleotides of one sequence in column 6 corresponding to the same contig sequence identifer SEQ ID NO:X (see Table 1C, column 2) are directly contiguous. Nucleic acids that hybridize to the complement of these 20 contiguous polynucleotides under stringent hybridization conditions or alternatively, under lower stringency conditions, are also encompassed by the invention. Polypeptides encoded by these polynucleotides and/or nucleic acids, other polynucleotides and/or nucleic acids encoding these polypeptides, and antibodies that bind these polypeptides are also encompassed by the invention. Additionally, fragments and variants of the above-described polynucleotides, nucleic acids, and polypeptides are also encompassed by the invention.

[0151] In specific embodiments, polynucleotides of the invention comprise, or alternatively consist of a polynucleotide sequence in which the 3′ 10 polynucleotides of one of the sequences delineated in column 6 of Table 1C and the 5′ 10 polynucleotides of another sequence in column 6 corresponding to the same row are directly contiguous. In preferred embodiments, the 3′ 10 polynucleotides of one of the sequences delineated in column 6 of Table 1C is directly contiguous with the 5′ 10 polynucleotides of the next sequential exon delineated in Table 1C, column 6. Nucleic acids that hybridize to the complement of these 20 contiguous polynucleotides under stringent hybridization conditions or alternatively, under lower stringency conditions, are also encompassed by the invention. Polypeptides encoded by these polynucleotides and/or nucleic acids, other polynucleotides and/or nucleic acids encoding these polypeptides, and antibodies that bind these polypeptides are also encompassed by the invention. Additionally, fragments and variants of the above-described polynucleotides, nucleic acids, and polypeptides are also encompassed by the invention.

Table 3

[0152] Many polynucleotide sequences, such as EST sequences, are publicly available and accessible through sequence databases and may have been publicly available prior to conception of the present invention. Preferably, such related polynucleotides are specifically excluded from the scope of the present invention. Accordingly, for each contig sequence (SEQ ID NO:X) listed in the fifth column of Table 1A and/or the fourth column of Table 1B, preferably excluded are one or more polynucleotides comprising a nucleotide sequence described by the general formula of a-b, where a is any integer between 1 and the final nucleotide minus 15 of SEQ ID NO:X, b is an integer of 15 to the final nucleotide of SEQ ID NO:X, where both a and b correspond to the positions of nucleotide residues shown in SEQ ID NO:X, and where b is greater than or equal to a +14. More specifically, preferably excluded are one or more polynucleotides comprising a nucleotide sequence described by the general formula of a-b, where a and b are integers as defined in columns 4 and 5, respectively, of Table 3. In specific embodiments, the polynucleotides of the invention do not consist of at least one, two, three, four, five, ten, or more of the specific polynucleotide sequences referenced by the Genbank Accession No. as disclosed in column 6 of Table 3 (including for example, published sequence in connection with a particular BAC clone). In further embodiments, preferably excluded from the invention are the specific polynucleotide sequence(s) contained in the clones corresponding to at least one, two, three, four, five, ten, or more of the available material having the accession numbers identified in the sixth column of this Table (including for example, the actual sequence contained in an identified BAC clone). In no way is this listing meant to encompass all of the sequences that may be excluded by the general formula; it is just a representative example. All references available through these accessions are hereby incorporated by reference in their entirety.

TABLE 3

| | SEQ | | | | |
|---|---|---|---|---|---|
| cDNA | ID | Contig | EST Disclaimer | | |
| Clone ID | NO: X | ID: | Range of a | Range of b | Accession Numbers |
| HACBT91 | 11 | 789939 | 1-827 | 15-841 | AW957974, AW003857, AI820045, AI523911, |
| | | | | | AW084836, AI983096, AI333432, AW188197, |
| | | | | | BF338099, N41047, AI433769, AI379333, |
| | | | | | AW438811, AA927750, BE139611, AI435307, BF436802, |
| | | | | | AW613586, R71675, AA678318, AA748856, |
| | | | | | AA301830, AI337423, AW243869, AA577365, |
| | | | | | AI382805, AI926335, AA568182, R47922, |
| | | | | | AA057770, R50081, BE247721, AI539624, AI698267, |
| | | | | | AI224055, BE244865, AI365443, N47137, |
| | | | | | AA903242, AV707146, AW955723, AV702790, |
| | | | | | AV701751, AW962407, AV705416, AI535639, |
| | | | | | AV705047, AW954994, AV703012, AW957544, |
| | | | | | BF380516, AV729076, AV707458, AV706060, |
| | | | | | AV704785, AV701728, AV709232, AW957628, |
| | | | | | AW954206, AV709235, AV707753, AV686390, |
| | | | | | AW955616, AW961393, AV725497, AV729376, |
| | | | | | AV728436, AV697196, AW958846, AW963660, |
| | | | | | AW951562, AW949999, AI535660, AV728733, |
| | | | | | AV692600, AV727314, AV703766, AV705319, |
| | | | | | AW959907, AW950888, AV656903, AW956199, |
| | | | | | AW957853, AV704180, AV696106, AV706223, |
| | | | | | AW963378, AW964540, AV727238, AV705869, |
| | | | | | AV705811, AW953969, AV689111, AW961593, |
| | | | | | AV695545, AV702266, AW952064, AV704955, |
| | | | | | AW963868, AV705135, AI525856, AW949731, |
| | | | | | AW958280, AV686420, AV686100, AV726103, |
| | | | | | AV695752, AV693523, AV709551, AV702861, |
| | | | | | AW951707, AV694674, AV709101, AV698429, |
| | | | | | AV702372, AV697498, AW950597, AW952223, |
| | | | | | AV692691, AV706229, AW958916, AV701067, |
| | | | | | AV658334, AV728670, AV705562, AW949729, |
| | | | | | AW955152, AV684962, AV729378, AW949523, |
| | | | | | AW957102, AV705134, AV685966, AW955662, |
| | | | | | AI536138, AW956637, AV653325, AV705693, |
| | | | | | AV702498, AW950199, AV708203, AW964369, |
| | | | | | AV701643, AW950172, AV707002, AV725153, |
| | | | | | AV706136, AI557602, AW955904, AV727916, |
| | | | | | AW950411, AV707024, AW949529, AV706147, |
| | | | | | AW963601, AW953788, AV647006, AV702035, |
| | | | | | AV705520, AW954782, AW951743, AW957682, |
| | | | | | AV702172, AW966604, AV705453, AW952368, |
| | | | | | AW956762, AW962384, AV654287, AV708025, |
| | | | | | AV728309, AW950079, AV708980, AW965813, |
| | | | | | AW958901, AW959980, AW955841, AV705959, |
| | | | | | AV725697, AW950395, AV706910, AW959982, |
| | | | | | AW950443, AW950248, AV708850, AV707329, |
| | | | | | AV703635, AW954237, AV704798, AV703030, |
| | | | | | AV703542, AW959543, AW963011, AW963750, |
| | | | | | AW950671, AW955713, AV725948, AW949451, |
| | | | | | AW966756, AV729132, AV701881, AW949927, |
| | | | | | AV653809, AW955609, AV649672, AW950446, |
| | | | | | AW949351, AV702673, AW957110, AW954372, |
| | | | | | AV728874, AV685955, AW949530, AW959828, |
| | | | | | AW964111, AW960601, AV705185, AW966444, |
| | | | | | AW950012, AW962444, AV725001, AV703494, |
| | | | | | AW959806, AV705981, AW952403, AW957987, |
| | | | | | AW966603, AV726789, AV661704, AV706893, |
| | | | | | AW964673, AV727978, AV706459, AW953797, |
| | | | | | AV707414, AK025994.1, U94592.1, Y08991.1, |
| | | | | | Z30183.1, AF217994.1, U45328.1. |
| HADDE71 | 12 | 839187 | 1-653 | 15-667 | BE646364, BE562975, BE734905, AA227916, |
| | | | | | BE275558, BE387443, AI568587, BE387535, |
| | | | | | AW245842, BE857544, AI805978, BE386863, |
| | | | | | AA530975, AA845548, BF437434, AW627607, |
| | | | | | BE741623, BE898827, AA393921, AI201926, |
| | | | | | AI391625, AI199262, AI675180, AI123847, |
| | | | | | AA463396, AI128152, AI197839, BE791237, |
| | | | | | BE384118, AA913172, AA505110, AW408817, |
| | | | | | AI187762, AI076304, BE899199, R52594, |
| | | | | | AW009600, AA465034, AA913634, AA488109, |
| | | | | | AA885156, AA452881, AA464960, AA884143, |
| | | | | | BF340639, AI886462, AI188491, BF446332, |
| | | | | | BF221728, AA227574, R84997, BE243531, |
| | | | | | BE903843, AA424231, BF331414, AI675231, BE249813, |
| | | | | | D45528, R40380, W60397, BE670322, |
| | | | | | F37062, R53393, AI473277, R84954, BE265829, AW407603, |
| | | | | | W60306, AA322573, AI928674, AI368380, |
| | | | | | AL535519, AI312011, AI886883, AI471250, BF032040, |
| | | | | | AA336279, AI357522, F31267, BE910005, |
| | | | | | BE311908, BE293522, AV681951, AI349772, BE964812, |
| | | | | | BG108147, BE047859, AW827203, BF054789, |
| | | | | | AV682330, AL513597, AL514803, AV682809, |
| | | | | | BG168696, AI868831, AW268253, AV682441, |
| | | | | | AL047042, AV682266, BF724691, BE047863, |
| | | | | | BF795712, BG058208, AV711509, AW071349, |
| | | | | | BE048071, AL514627, AL513907, AL513803, |
| | | | | | AV758592, AV723772, AL515041, BE613622, |
| | | | | | AV758110, AV710479, AV762488, BF673434, |
| | | | | | AV704928, AI349645, AV682249, AI815383, |
| | | | | | AV755581, AL135661, AV695052, BF968041, |
| | | | | | BE905408, BG033403, AV733397, AV682521, |
| | | | | | AV723204, BG179993, AI684265, AV756770, |
| | | | | | AI349614, AV682051, AV682772, AL119049, |
| | | | | | AV681668, AV682289, AV706777, AL514791, |
| | | | | | BG250190, AI207510, BF726322, AL514473, |
| | | | | | BE785905, BE880190, AV655645, BE881155, |
| | | | | | AV681630, AV682252, AL121270, AV723062, |
| | | | | | AL045500, AL513643, AV758668, AI906328, |
| | | | | | AV758217, AV681857, AV757012, BG108324, |
| | | | | | AV682082, AL120854, AV682479, AV681872, |
| | | | | | AL514935, AW080838, AV682074, BG105099, |
| | | | | | AV682466, AV729890, AV682222, BF981774, |
| | | | | | BG259801, AI349598, BF343172, AL515047, |
| | | | | | AL514155, BE048319, AV755613, AW467961, |
| | | | | | AV682672, AL515373, AI500553, AI907070, |
| | | | | | BG254754, AI064830, BE964700, AV733385, |
| | | | | | BF340104, BE777769, BE964486, AI687376, |
| | | | | | AW166645, AV682697, AV756703, AV682476, |
| | | | | | AV726951, AV756477, AV682351, BG109125, |
| | | | | | BG036846, BG259943, AL513631, AL515173, |
| | | | | | AI909666, AL514261, BG110283, AI340582, |
| | | | | | BE783707, AI436456, BF971016, BF969662, |
| | | | | | BE891101, BG178809, AV758806, AV755614, |
| | | | | | AV708119, AV757096, AL036396, AV681858, |
| | | | | | BE877769, BE018711, AW162071, BG114104, |
| | | | | | AV732941, AV723953, BE906959, AV710608, |
| | | | | | AV705644, AV733326, AV734318, BE048065, |
| | | | | | BF883916, AV681586, AL513763, AL514691, |
| | | | | | BG257535, AV704350, AV758738, AV729334, |
| | | | | | BF339420, AI580190, AI149592, AI345111, |
| | | | | | AI624859, AV682496, AL514919, BF344705, |
| | | | | | BE967113, AF078844.1, AF125949.1, AL512733.1, |
| | | | | | AL389978.1, S78214.1, AL133640.1, BC007021.1, |
| | | | | | AF090900.1, AF090934.1, AL442072.1, |
| | | | | | AL050393.1, AL049938.1, BC008387.1, AL157431.1, |
| | | | | | AB048953.1, AF090943.1, AB055303.1, |
| | | | | | BC008417.1, AL133016.1, AL110196.1, AB056809.1, |
| | | | | | AL136586.1, AL442082.1, AF090901.1, |
| | | | | | BC008365.1, AL050146.1, AL137527.1, AL117457.1, |
| | | | | | AJ242859.1, AK026608.1, AL136787.1, |
| | | | | | AL133606.1, AL117460.1, AB050510.1, AF218014.1, |
| | | | | | AL122050.1, AF104032.1, AB056420.1, |
| | | | | | AF090903.1, AK000212.1, BC008488.1, AL080060.1, |
| | | | | | AL390167.1, AL049452.1, AB049758.1, |
| | | | | | AL359596.1, AB063046.1, AL136749.1, AL110221.1, |
| | | | | | BC003687.1, AL359601.1, AF111847.1, |
| | | | | | BC003683.1, AL136789.1, AF106862.1, AK026865.1, |
| | | | | | AL162006.1, AK027868.1, AB047615.1, |
| | | | | | AF090896.1, AL136892.1, AB048964.1, Y16645.1, |
| | | | | | U42766.1, AL049430.1, AB019565.1, |
| | | | | | AL050149.1, AL049466.1, AB063070.1, AK026741.1, |
| | | | | | AL050116.1, AK025084.1, AL122093.1, |
| | | | | | AL162083.1, AK025339.1, AB060916.1, AL050108.1, |
| | | | | | AB055361.1, BC001967.1, AB060887.1, |
| | | | | | AB056768.1, AB060908.1, AB063008.1, AB047801.1, |
| | | | | | AL096744.1, AL049314.1, AL133075.1, |
| | | | | | AL133557.1, AK025958.1, AK026045.1, AL133258.16, |
| | | | | | AL133080.1, AL136799.1, AF219137.1, |
| | | | | | AK026855.1, AL050277.1, BC006807.1, AF091512.1, |
| | | | | | AL122123.1, AL080137.1, AL080124.1, |
| | | | | | AC007375.6, AL133093.1, AB060912.1, AK026784.1, |
| | | | | | AL137283.1, AL389982.1, AF097996.1, |
| | | | | | AL133565.1, AK026744.1, AB060863.1, AL137459.1, |
| | | | | | AL353594.13, AL137557.1, AK000618.1, |
| | | | | | AL512746.1, BC002733.1, AL136844.1, AL136768.1, |
| | | | | | AL122121.1, U91329.1, AL050138.1, |
| | | | | | AC007390.3, AF146568.1, AK026542.1, AK025772.1, |
| | | | | | AK026533.1, AP001873.3, AL512719.1, |
| | | | | | AL117394.1, AK027096.1, AL512718.1, AF091084.1, |
| | | | | | AC026787.4, AK000614.1, AC004690.1, |
| | | | | | AB055368.1, BC006195.1, AL359618.1, AF207829.1, |
| | | | | | AK000445.1, AB062938.1, AL110225.1, |
| | | | | | AK000137.1, AK025092.1, AB060825.1, AF125948.1, |
| | | | | | AC022215.4, AK026452.1, AK000083.1, |
| | | | | | AL137550.1, AL512754.1, AF271350.1, AL359941.1, |
| | | | | | AB047904.1, X82434.1, AB060826.1, |
| | | | | | AK026353.1, AC002467.1, AB048954.1, BC001045.1, |
| | | | | | BC004556.1, AK000652.1, AB048974.1, |
| | | | | | AL117585.1, AL512454.6, AC000111.1, AL353802.14, |
| | | | | | AK026592.1, AL513015.6, AL359615.1, |
| | | | | | AL499604.9, AC006371.2, AB051158.1, AB055366.1, |
| | | | | | AC006336.4, AL133560.1, AL512689.1, |
| | | | | | AC004686.1, AK026647.1, AK026927.1, AK026583.1, |
| | | | | | AL117583.1, AK024538.1, AK026480.1, |
| | | | | | AF348209.1, AF177336.1, AL353940.1, AP001699.1, |
| | | | | | AF334404.1, AF061943.1, AC026464.6, |
| | | | | | AB055315.1, AB052191.1, AB060852.1, AK025491.1, |
| | | | | | AL049382.1, AL022147.3, AC005886.2, |
| | | | | | AK026528.1, AL049300.1, AK027113.1, AL049464.1, |
| | | | | | AK026504.1, AK026959.1, AL117435.1, |
| | | | | | AL136928.1, AL050024.1, AL161628.9, AL445236.22, |
| | | | | | AK026534.1, S61953.1, AL136845.1, |
| | | | | | AK026086.1, AF225424.1, AK026532.1. |
| HADDJ13 | 13 | 827273 | 1-2304 | 15-2318 | AW575129, AW022897, AA010299, AU144131, |
| | | | | | AA669573, F11929, AL138228, AA634252, |
| | | | | | T66105, AA219059, R91924, R51726, |
| | | | | | AA856981, AA782322, AC079383.17, AC004552.1, Z95118.1, |
| | | | | | AF224669.1, AC018797.4, AC003035.1, AL161436.12, |
| | | | | | AC008625.5, AC002565.1, AC002350.1, |
| | | | | | AL390738.4, AC073593.13, AL354932.26, AC004491.1, |
| | | | | | AC011497.6, AC051619.7, AC008440.8, |
| | | | | | AF205588.1, AC007546.5, AC005250.1, AC016594.6, |
| | | | | | AC006038.2, AL031120.1, AC020658.6, |
| | | | | | Z84469.1, AC018719.4, AC006080.1, AF324890.1, |
| | | | | | AL354873.19, AL391259.15, AL162615.13, |
| | | | | | AL034372.33, AC018639.8, AL132777.4, AC004605.1, |
| | | | | | AL352978.6, AL160269.14, AL136000.4, |
| | | | | | AC024168.4, AL080275.20, AC090942.1, AC004685.1, |
| | | | | | AC008901.5, Z82198.2, AL121578.1, |
| | | | | | AC013734.4, AL133286.9, AC002091.1, AL356575.8, |
| | | | | | AC007934.7, AC005035.1, AL031311.1, |
| | | | | | AC005840.2, AL117337.25, AL035400.13, AC068724.7, |
| | | | | | AC007225.2, AL499604.9, AC005208.1, |
| | | | | | AL139785.5, AC002368.1, AC011484.4, AL162233.14, |
| | | | | | AC018637.3, AC091493.1, AL035555.10, |
| | | | | | AL136231.12, AP001714.1, AC044797.5, AC006211.1, |
| | | | | | AC009779.18, AL160155.19, AP000512.1, |
| | | | | | AC079754.4, AL391987.15, AP001732.1, AC083861.2, |
| | | | | | AC024060.5, AC025262.27, AL158069.16, |
| | | | | | AB023051.1, AC087311.22, AC078833.3, AC005670.1, |
| | | | | | AL391136.9, AL163267.2, AL080315.18, |
| | | | | | AC022201.4, AL138721.16, AC007318.4, AC005529.7, |
| | | | | | AL121594.6, AL136300.22, AL391114.12, |
| | | | | | AC006285.11, AL079342.17, AL031293.1, U82671.3, |
| | | | | | AC011310.3, U52111.2, AC018812.5, |
| | | | | | AL136365.9, AC078846.2, AL356379.10, AC007358.2, |
| | | | | | AL162231.20, AC000085.5, AC072061.8, |
| | | | | | AC010234.5, AC007151.2, AL445669.9, AL079340.7, |
| | | | | | AL445928.8, AC007363.3, Z94056.1, |
| | | | | | AC012377.5, AC006195.1, AL139109.14, AC002312.1, |
| | | | | | AC012368.6, AL022164.1, AC027124.4, |
| | | | | | AC005884.1, AC016574.6, AC010735.11, AL358815.12, |
| | | | | | AC008009.4, AL109964.20, AL161793.9, |
| | | | | | AL139092.12, AC010326.6, AC003950.1, AC002351.1, |
| | | | | | AC022468.5, AE000658.1, AC009484.3, |
| | | | | | AL031659.9, AC009247.12, AL138836.15, AL121595.5, |
| | | | | | AC004674.1, AC007386.3, AL355339.7, |
| | | | | | AC025168.7, AC021188.6, AP001731.1, AL138832.10, |
| | | | | | AC007228.1, AL355530.6, AJ009612.5, |
| | | | | | AP001671.1, AC015853.8, AC073607.19, AL137230.3, |
| | | | | | AL031295.1, AL122125.4, AC018641.3. |
| HADMA77 | 14 | 783049 | 1-1899 | 15-1913 | BE886986, AL118575, BF963505, BE896957, |
| | | | | | AA019981, AI871227, AW958870, AI148306, |
| | | | | | AI090074, AA594961, AI620245, N62115, |
| | | | | | AI499838, BE139496, AA253149, H37934, AW953772, |
| | | | | | AA398760, BE883579, AW008316, R17479, |
| | | | | | AI934670, AA253150, AI436173, AI446137, D59581, |
| | | | | | AI128007, R54297, H42535, D61056, |
| | | | | | D80139, R61184, AI197892, AA729655, D51488, H55864, |
| | | | | | H55771, AI075689, AA911710, AA292804, |
| | | | | | H86756, BF963502, T57670, AI961860, H42534, |
| | | | | | D51454, D81542, T34704, D80154, |
| | | | | | D81775, AA001440, T59256, D59479, R42975, R61185, |
| | | | | | AA994602, D51481, D51437, D59463, |
| | | | | | D59482, R46039, R51909, AA359928, AA659063, N79566, |
| | | | | | Z40268, R25021, R42826, D52193, |
| | | | | | Z42365, AA358058, T57710, AV656695, AL048093, R43779, |
| | | | | | AW276733, AA365016, AL048094, F01883, |
| | | | | | AA708838, C14366, N78346, AI601109, W16551, |
| | | | | | R18081, C00235, BF663261, BC007974.1. |
| HADMB15 | 15 | 847116 | 1-316 | 15-330 | AW136268, BG056888, AI131328, AI174443, |
| | | | | | AI091646, AW117296, AW168872, AI082447, |
| | | | | | AI432175, AI290911, AI741489, AI682685, |
| | | | | | AI142536, BG059892, AW149659, AW071935, |
| | | | | | AA233541, AI183690, BG056462, AI689641, |
| | | | | | AA599916, BF196591, BF196843, AA199743, |
| | | | | | AW136277, N77910, AA564806, AA243035, |
| | | | | | AA779709, AV722133, AI032138, AA844525, |
| | | | | | AI467910, AW965361, AA852418, AI982751, |
| | | | | | AI282445, AI982761, T03902, AI420648, AW167499, |
| | | | | | H08108, BE328548, AW068986, C15651, |
| | | | | | D52660, AW665899, AI246702, AI538705, AI271662, |
| | | | | | AI435112, AI288692, BE466948, AI690048, |
| | | | | | D55112, AA779042, AL536118, D53747, D54101, |
| | | | | | AA486941, D53384, W07076, AA232504, |
| | | | | | AA486765, BF832290, AI038647, AW497637, BF947006, |
| | | | | | AU155428, T05461, AL136582.1, BC001207.1, |
| | | | | | AB040527.1, AB058762.1, AB040528.1, AB040529.1. |
| HAGBQ12 | 16 | 722205 | 1-729 | 15-743 | AI332690, AI374724, AI285345, AA876359, |
| | | | | | AA987498, AI702600, AI079453, AI382918, C04098, |
| | | | | | R63800, AI697895, H87363, R67068, |
| | | | | | BE673734, R73892, BF432849, R68633, R68632, R66112, |
| | | | | | H03322, AA340294, H87907, AP000350.1, |
| | | | | | AC007363.3, AC003969.1, AC005948.14, AP000360.1, |
| | | | | | AC004066.1, AC000053.2, AC002060.3, AL450169.1, |
| | | | | | AL033522.1. |
| HAGCC87 | 17 | 638587 | 1-1578 | 15-1592 | AA587370, AA351604, AA661545, R22639, |
| | | | | | R22638, R18189, AA650370, AI459585, AI810301, |
| | | | | | R17880, BF434228, BE811111, BE701381, |
| | | | | | AA572974, BF857849, T50676, AL120282, AW168846, |
| | | | | | AI192440, AA714288, AI268019, AI745335, |
| | | | | | BF681619, BF828236, AU117483, BE147135, |
| | | | | | AA503298, AW513071, BE675695, AI811846, |
| | | | | | AI203527, AI079823, AI826761, AA634991, |
| | | | | | AI355007, AW769654, AI249365, AA704040, |
| | | | | | AA602951, AA652834, AV762430, W02749, |
| | | | | | AA836552, AF236698, AA492105, AA747977, |
| | | | | | AA948670, AI523316, AW337805, AI565126, |
| | | | | | AI610737, AA405726, AW512528, AI499954, |
| | | | | | AW013787, AA565232, AI917636, AI869797, |
| | | | | | AI133083, BG056992, AI887235, AA483075, |
| | | | | | AI366555, BE906142, AA425924, N33184, AA282951, |
| | | | | | AA773473, BF868994, AA833896, AA775188, |
| | | | | | AA251356, AA833875, BF845126, T17332, |
| | | | | | AW589345, AA736488, AW747980, BE677126, |
| | | | | | AA713705, AA904211, H91062, BF991881, |
| | | | | | AW194325, BF447461, BF032064, AL118612, |
| | | | | | AL034430.4, AL138878.10, AL133332.12, |
| | | | | | AL117380.28, AL161725.13, AP000143.1, AC004650.1, |
| | | | | | AL160155.19, AL035086.12, AL512310.3, |
| | | | | | AL450265.11, AL022393.1, AC004166.12, AC024167.5, |
| | | | | | AL390918.7, AL135960.1, AJ131016.1, |
| | | | | | AL035683.9, AF196969.1, AP001695.1, AL049795.20, |
| | | | | | AC079174.20, AP000090.1, AC002542.1, |
| | | | | | AC087777.2, AP000893.5, AL365364.19, AL118525.17, |
| | | | | | AC003962.1, AC004540.1, AL022238.1, |
| | | | | | AC003665.1, AC005042.1, AC007597.3, D87675.1, |
| | | | | | AC004662.1, AP001972.4, AP003438.2, |
| | | | | | AL365223.19, AC010223.5, AC000379.1, AL161670.4, |
| | | | | | AP001694.1, AC004820.2, AL035594.7, |
| | | | | | AC004776.1, AC008537.5, AL138759.20, AC002312.1, |
| | | | | | AL360270.18, AC083884.6, AL031663.2, |
| | | | | | AC006213.1, AL139322.13, AL356017.3, AC008906.5, |
| | | | | | AL031726.22, AL355385.15, AC012170.6, |
| | | | | | AL158147.17, AL138761.12, AL360089.13, AC000085.5, |
| | | | | | AC079141.7, AL109938.8, AP002847.2, |
| | | | | | AL512430.14, Z86064.1, AC006511.5, AC055745.23, |
| | | | | | AL138784.30, AC004987.2, AF168787.1, |
| | | | | | AC023600.19, AP001718.1, AP000171.1, AP000056.1, |
| | | | | | AL512658.12, AL031774.1, L78833.1, |
| | | | | | Z82190.1, AC034186.4, AL031319.5, AP000124.1, |
| | | | | | AL121902.13, AC012368.6, AL133418.4, |
| | | | | | AL121997.7, AC005856.1, AL137800.12, AC078961.23, |
| | | | | | AP001706.1, AL163210.2, AC009996.7, |
| | | | | | AC026164.5, AL050349.27, AC006251.3, AC020604.9, |
| | | | | | AC011003.7, AC023510.16, AC005913.2, |
| | | | | | AJ400879.1, AC007367.3, AL360230.20, AP000330.1, |
| | | | | | AL132986.4, AL590611.7, AL445489.10, |
| | | | | | AC026203.3, AL031427.15, AL033378.12, AL031577.1, |
| | | | | | AC090514.1, AC024093.46, AC026202.6, |
| | | | | | AC009220.10, AC006455.2, AC005047.3, AL031584.1, |
| | | | | | AC008685.7, AC006039.2, AC009499.4, |
| | | | | | AC005091.1, AC005924.2, AL358354.16, AL031123.14, |
| | | | | | AC002044.1, AC018821.4, AL139274.17, |
| | | | | | AC013468.12, Y10196.1, AC067941.7, AC010340.7, |
| | | | | | AC068102.4, AC003108.1, AC006023.2, |
| | | | | | AC084865.2, AC018686.7, AC006928.15, AC007130.2, |
| | | | | | AL117330.6, AL031594.9, AL392044.7, |
| | | | | | AC068724.7, AL450344.4, AL118520.26, AL121929.17, |
| | | | | | AC073927.9, AC005358.1, AL034346.31, |
| | | | | | AL445590.4, AP001728.1, AF205588.1, AC022116.5, |
| | | | | | AP000851.4, AL034372.33, AC005098.2, |
| | | | | | AP001432.1, AC025540.7, AL357912.10, AC005065.1, |
| | | | | | Z95116.1, AL139021.6, AL590037.7, |
| | | | | | AP000462.2, AC007955.4, AP000151.1, AL139125.18, |
| | | | | | AB017654.1, AL159140.4, AC005343.1, |
| | | | | | AC090950.1, AC018641.3, AL117337.25, AL034421.7, |
| | | | | | AL160471.5, AL080243.21, AC022469.5, |
| | | | | | AL590073.6, AC023114.5, AL031295.1, Z86061.1, |
| | | | | | AC007458.13, AL163195.5, AL049832.3, |
| | | | | | AC012519.9, AL022069.1, AL162551.3, AC007005.3, |
| | | | | | AC004167.1, AL358434.16, AC005099.1, |
| | | | | | AL138876.23, AC006460.3, AC004477.1, AL445217.3, |
| | | | | | AP002015.3, AL138958.18, AC004802.1, |
| | | | | | AC007254.3, AC016579.5, AL391262.3, AC018752.4, |
| | | | | | AL022329.9, AL133453.3, AP001646.4, |
| | | | | | AC007270.2, AP000469.2, AL359645.15, AC011246.6, |
| | | | | | AC003043.1, AC005971.5, AC009032.7, |
| | | | | | AL353752.6, AC004911.1, AC034207.4, AL356057.12, |
| | | | | | AC009482.4, AC083868.2, AC007256.5, |
| | | | | | AC069262.24, AL353741.16, Z98200.8, AP001708.1, |
| | | | | | AL391839.9, AL118556.4, AL137072.8, |
| | | | | | AC015971.4, AC010553.6, AC012634.7, AP001717.1, |
| | | | | | AP000567.2, N55064. |
| HAGHN57 | 18 | 773286 | 1-2426 | 15-2440 | AL533248, AU118622, AU119331, AU133909, |
| | | | | | AU119469, AU118182, BE794468, BE791529, |
| | | | | | BG176702, BE280450, BE729801, BF663566, |
| | | | | | BF970116, BE257176, BG032912, AL516224, |
| | | | | | BG121097, BE784191, BG249033, BE727671, |
| | | | | | BE881192, BE745390, BF792305, BF037862, |
| | | | | | AV710149, BE617085, AV751361, AW291174, |
| | | | | | BG163346, AI686123, BG033409, AV762315, |
| | | | | | AV704873, BE540243, BF344980, AV707943, |
| | | | | | BF671351, BE394881, AW070780, BE538770, |
| | | | | | BF303671, BE541947, AW963773, BF303913, |
| | | | | | AW299817, BE378370, AW299807, BF107096, |
| | | | | | AW515893, AI338838, BE254836, AW402330, |
| | | | | | AA455894, AI436127, AL516223, BF001973, |
| | | | | | AI392820, W31025, W28207, BE535313, |
| | | | | | BE258523, BF109189, AA182513, BE617702, AW275883, |
| | | | | | AW674662, BG169977, BE711218, AA134574, |
| | | | | | AW304388, AA588768, BE868534, AU144819, |
| | | | | | AA455892, BF802948, BF222585, AW902162, |
| | | | | | H16095, AI034153, AU145137, AI905391, AI985354, |
| | | | | | BG011776, AW612879, BE711276, AV659416, |
| | | | | | AU150558, BE702340, BF055535, BE711244, |
| | | | | | AA652292, AW271981, AA780056, AI624858, |
| | | | | | AA319693, AA604113, AV744893, AW771218, |
| | | | | | AV742941, AA837954, T60588, AA150957, |
| | | | | | AA151047, AI991761, AI912891, AI628783, AI434787, |
| | | | | | AW072744, AA716130, BF807693, AA181782, |
| | | | | | AI554969, AA916968, AA101864, AI473865, |
| | | | | | AA362607, AW338509, AI525459, BE244147, |
| | | | | | AI928082, AI433249, BF062859, AI910904, |
| | | | | | AA285264, BE711295, AI354885, AW006732, |
| | | | | | AI950274, AU144122, AI990867, AI922170, |
| | | | | | AA115829, AA806393, BE672240, AU156842, |
| | | | | | BE243206, AI633602, W01852, BE711219, |
| | | | | | AI280611, AA707161, AA301320, BF197637, |
| | | | | | AI695111, AW966603, BF447153, F29695, |
| | | | | | BE378061, AA336840, AI424341, AA385049, |
| | | | | | AI307649, N58884, AA131117, AI205138, BF431130, |
| | | | | | BF807685, N98771, AA602492, BE711204, |
| | | | | | BF438567, F34557, AA748737, T60437, AA745028, |
| | | | | | AW891490, AW673414, AI630237, AW378199, |
| | | | | | AW779341, BE172988, BE172375, AA101187, |
| | | | | | AA781579, AI478435, BE699167, R57333, |
| | | | | | AI927982, R92570, BE764834, BF818234, AA648053, |
| | | | | | BE464290, AK000994.1, AC004668.1, AL050216.1, |
| | | | | | AA227675. |
| HAGHR18 | 19 | 655435 | 1-1128 | 15-1142 | AA678513. |
| HAQAI92 | 20 | 688037 | 1-593 | 15-607 | AL522436, AL524148, AA513002, AI735602, |
| | | | | | AA772397, AW014080, AI799589, AI818675, |
| | | | | | BE617237, AA478326, AI217776, AW409592, |
| | | | | | BE646171, AI005409, AA552147, AW177019, |
| | | | | | H42123, R00846, H42122, BE795741, |
| | | | | | AA362478, AI491808, AI769438, AI560335, BE613582, |
| | | | | | AI336126, AI371050, R01499, AI610208, |
| | | | | | BF089287, BF095098, AW613379, AI275309, BF752321, |
| | | | | | BC004222.1, AL118502.38. |
| HAQBG57 | 21 | 837545 | 1-1034 | 15-1048 | BE562515, AI742455, AI961996, AA507216, |
| | | | | | AI190639, AA731364, AI673081, AA593594, |
| | | | | | AI003558, BF528073, BF885284, AI435334, |
| | | | | | AW438908, AI381200, R69327, AI204170, AI739035, |
| | | | | | AI401755, AI591140, AA432147, AA251459, |
| | | | | | AW967618, AA446655, AI682154, AW613695, |
| | | | | | AI500259, AA398391, R79970, AI149747, |
| | | | | | H97579, AI263813, AA401707, BE350370, R69328, |
| | | | | | AA670245, AA643922, AA852081, BF345349, |
| | | | | | AA889222, BE782687, BF034010, BF038771, |
| | | | | | BC008671.1. |
| HAQCE11 | 22 | 633730 | 1-582 | 15-596 | N45328, H29603, F10900, AW949645, |
| | | | | | D80045, AW965158, AW949642, AV738340, AV742732, |
| | | | | | AV724520, AW949643, AV741220, AW964468, |
| | | | | | AW966389, AV718489, AW966330, AV699550, |
| | | | | | D58283, AV718692, AW975618, AV742048, |
| | | | | | AW978634, D81030, AV718844, AW959570, |
| | | | | | AV720203, D80043, D59619, D80195, |
| | | | | | D80210, D80240, D51423, D51799, D80391, D80253, |
| | | | | | AV719822, D80227, AV719324, AV719783, |
| | | | | | AV718800, AW966531, D80188, AV720211, |
| | | | | | AV720464, AV718770, AV720731, D80219, |
| | | | | | AV699447, AV722801, D80196, AV723927, |
| | | | | | AV699927, C14429, D59927, D80038, |
| | | | | | D80212, D80193 D80022, AV719468, AW949632, F13647, |
| | | | | | AW949641, D80366, D59889, AV700889, |
| | | | | | AV720812, AV721386, AV723097, AW973447, |
| | | | | | AW949656, C15076, AW949629, AW966062, |
| | | | | | D59275, AW966053, AW964532, AV701335, |
| | | | | | AV742001, AV701043, AV701332, AV701017, |
| | | | | | AV701248, AW959628, AV701431, AW949653, |
| | | | | | D80378, T03269, AW949633, AW949658, |
| | | | | | C75259, AV744690, D50995, AW949657, AV719188, |
| | | | | | AV719557, AW949631, AV742667, AV701125, |
| | | | | | AV701166, AV700229, AV699746, C14014, |
| | | | | | AW973307, AW975621, AV702035, D80134, |
| | | | | | AW949646, AV701419, AV699479, AV701154, |
| | | | | | D80164, AW959582, AV701443, AV744012, |
| | | | | | AV720028, D59502, D81026, AV719628, AV718707, |
| | | | | | D80166, AW966534, AV701130, AV701149, |
| | | | | | AV701422, D59859, D80268, AV718440, AW965177, |
| | | | | | AV741221, AW949618, AV645344, D51250, |
| | | | | | D80269, AW960553, AW966054, D80168, D59467, |
| | | | | | AV701428, D80949, AV701415, AV701344, |
| | | | | | AV719000, D59787, AV745080, AV645389, D80522, |
| | | | | | AV681510, AV681491, AV701021, AV645343, |
| | | | | | AW959202, AW960414, AV681505, AV681504, |
| | | | | | AW949654, AV721784, AW973541, AW966013, |
| | | | | | AV720654, D58253, AW966041, AV719913, |
| | | | | | AV718674, AV705134, C14227, AW959597, |
| | | | | | AW964737, C14331, AV720791, AV701004, |
| | | | | | AW978661, AW973470, D50979, AW966050, |
| | | | | | AW752082, AV720220, AV700622, AV699669, |
| | | | | | D80024, AV743601, AV681529, AW966043, |
| | | | | | AV704180, AV705869, AV706229, AV701224, |
| | | | | | AW949655, AV719049, AV701330, AV681468, |
| | | | | | AV720607, AW960465, AW973334, AW964488, |
| | | | | | AV681474, AV741012, D57483, AV742671, |
| | | | | | AW973485, AV744773, AV718633, AW975605, |
| | | | | | AV681526, AV727978, D59610, AI905856, |
| | | | | | AV699682, AV718931, AV744934, AV645383, |
| | | | | | AV645393, AW959799, AV681528, AV645339, |
| | | | | | AV681472, AW978648, AV681507, AV681465, |
| | | | | | AV681525, AV681495, AV681486, AV681464, |
| | | | | | AV681487, AV681506, AV681523, AV742720, |
| | | | | | AW966029, AV742430, AW966022, AV738928, |
| | | | | | AV726812, AW966023, AA285331, AV706147, |
| | | | | | D59695, D81111, AV744768, AW949620, |
| | | | | | D80241, AW958992, AW964756, AV681514, AV681477, |
| | | | | | AV681512, AV681497, AV681483, AF035294.1, |
| | | | | | AB028947.1, AF271371.1, D34614.1, X67155.2, |
| | | | | | D88547.1, AF058696.1, AB028859.1, AB002449.1, |
| | | | | | U79457.1, Y08991.1, U94592.1, Z30183.1, |
| | | | | | D50010.1, AB033111.1, S78798.1, X92518.1, |
| | | | | | AB038216.1, X98248.2, U45328.1, X60736.1, |
| | | | | | AF217994.1, AB035274.1. |
| HBAGD86 | 23 | 838799 | 1-1699 | 15-1713 | AI658681, BE466145, AI806836, AI653272, |
| | | | | | AA004211, BE302094, BF970406, BE018485, |
| | | | | | AA418617, AA594901, AI580148, BF589715, |
| | | | | | AI804211, AI669907, AI342168, AI810310, |
| | | | | | AA506350, AW022528, H10330, AA721162, |
| | | | | | AA452114, W03931, AW953290, AI262137, R61309, |
| | | | | | AA680147, N62384, H10331, AI264925, |
| | | | | | AA765972, BF086698, AW275301, AA485210, C15277, |
| | | | | | N79353, AA350799, AI867727, AI474438, |
| | | | | | AI129224, AA093047, D60782, AI535847, AA897480, |
| | | | | | AA350798, AV714899, AW956763, AV728867. |
| HBGBC29 | 24 | 691473 | 1-1842 | 15-1856 | BF223021, BF036281, AI341667, AA180986, |
| | | | | | AU153625, AU151704, AI093197, BE855464, |
| | | | | | BE018834, BE616741, BF684563, AI694268, |
| | | | | | AA031711, AI469856, N63041, N50125, AI150599, |
| | | | | | AI597740, AI985206, AI671591, W72535, |
| | | | | | BF431270, AI741942, AA037642, AA180865, AA031648, |
| | | | | | AA436065, AI800796, AA129939, BF056140, |
| | | | | | AW002265, AU157670, AI074205, AA830493, |
| | | | | | BF063800, AI056532, AI656721, W00519, |
| | | | | | AI275143, AI337739, AW172525, AA443349, |
| | | | | | AA043021, AA446926, AI655558, AI769027, |
| | | | | | AA101851, AA917703, W93307, AA526333, |
| | | | | | AI689128, AA777090, AW002829, BE295568, |
| | | | | | AW139517, AI128702, AI276137, AW801873, |
| | | | | | AA873711, AW892754, N98234, W76109, |
| | | | | | AI631104, AA856832, W92810, AA042939, H87505, |
| | | | | | AA129938, AI688779, AA693329, AI676108, |
| | | | | | T87624, AA570072, AA037641, AI186390, |
| | | | | | AW515672, AA031685, AA037500, R82703, |
| | | | | | AA037234, AW380430, AA985191, AU131994, |
| | | | | | BE302396, H87506, AA938640, AI926907, |
| | | | | | AU118291, AI696069, T74071, AA102060, AW057528, |
| | | | | | AI671894, AI962374, AI695458, AA046964, |
| | | | | | BE869607, BF814627, F12449, AA725452, AI968837, |
| | | | | | AA917824, AA054749, BF437316, F10070, |
| | | | | | AA917678, BE218382, BE669660, AI916503, |
| | | | | | AW612381, AA683581, AI984598, AA937814, |
| | | | | | AI932475, AA046963, AA053281, AI801723, |
| | | | | | BE858841, AI499751, AA031686, AI074981, |
| | | | | | AI341558, AI478279, BF735972, AK001006.1, |
| | | | | | BC004523.1, AF020920.1, AF038662.1, AB024436.1, |
| | | | | | AF022367.1. |
| HBJAB02 | 25 | 837309 | 1-1679 | 15-1693 | AL529646, AL529645, BE898304, BG112747, |
| | | | | | BF791411, BG036058, BE392384, BE621757, |
| | | | | | BE548173, BE895853, BG034671, AA808894, |
| | | | | | BE901085, BE278873, AW152607, BE795658, |
| | | | | | AW166898, BG122141, BE782474, BF972826, |
| | | | | | BE793716, BE140314, AW750993, AA826362, |
| | | | | | AW517942, BE714673, T59668, BE731030, |
| | | | | | BF939314, BE732766, BE745104, AI290469, BF477770, |
| | | | | | AI805651, AI961329, AA581089, BE902575, |
| | | | | | AW197375, AA974066, AI950259, BF802171, |
| | | | | | W27729, AV693783, AA877530, AA715365, |
| | | | | | AI968889, AA885542, AA160748, AA386371, |
| | | | | | AA335719, BF873961, W73105, BF223151, |
| | | | | | BE740826, AL120854, BE548914, AA318192, |
| | | | | | AA501478, BF125073, AI948815, AA581100, |
| | | | | | AA658457, AI621069, T59802, AA468534, |
| | | | | | AA503715, BF850755, AW956069, AW841506, |
| | | | | | AI144504, AA352215, BE897964, BF883404, |
| | | | | | BF373009, BE090290, BE168997, AW855521, |
| | | | | | AW820855, BG230749, BF376598, BE622839, |
| | | | | | AV699089, AV647789, AI567702, AV726156, |
| | | | | | AW961037, AW411235, AV726058, AW020397, |
| | | | | | AV706279, AV702427, AV651955, AV702026, |
| | | | | | BE393551, AV727787, AV660608, AV687176, |
| | | | | | AW021717, AV698545, AV687909, AV709256, |
| | | | | | AV708438, AV656903, AV661704, AV696106, |
| | | | | | AV697196, AW409775, AW951263, AV689111, |
| | | | | | AV655280, AV728157, AV692345, AV659322, |
| | | | | | AV654908, AV656478, AV708893, AV709314, |
| | | | | | AV708381, AV660728, BG168549, AV659536, |
| | | | | | AV691080, AV706219, AV695545, AV652001, |
| | | | | | AV705159, AV648263, AV703169, AV728518, |
| | | | | | AV707541, AW952409, AV709660, AV726624, |
| | | | | | AV706854, AV729220, AV709604, AV687035, |
| | | | | | AV696866, AV728997, AV704955, AV726816, |
| | | | | | AV725920, AV652156, AV701707, AV656283, |
| | | | | | AV704234, AV708025, AV707933, AV684604, |
| | | | | | AV729378, AV708980, AV692691, AV701914, |
| | | | | | AV708723, AV702516, AV693523, AV709407, |
| | | | | | AV705693, AV708992, AV729263, AV726103, |
| | | | | | AV708704, AV727029, AV726520, AV728733, |
| | | | | | AV725826, AV702021, AV725134, AV705280, |
| | | | | | AV645906, AV683415, AW265004, AW964228, |
| | | | | | BE047925, AV705076, AV707792, AV729259, |
| | | | | | AA127565, AW022102, AV686064, AV701067, |
| | | | | | AV704124, BC000131.1, AK000069.1, |
| | | | | | AC015651.18, AF147378.1, AK027463.1, AF097996.1, |
| | | | | | AF217986.1, AF217994.1, BC000090.1, |
| | | | | | BC003658.1, BC008282.1, AL356376.9, S71381.1, |
| | | | | | AK026494.1, BC006378.1, BC004362.1, |
| | | | | | AL137283.1, AK000212.1, AY026527.1, Y08991.1, |
| | | | | | BC007199.1, AF218004.1. |
| HBMUH74 | 26 | 866160 | 1-712 | 15-726 | AI633540, BE999936, AL529110, AI911597, |
| | | | | | AW016785, AA479308, AI381011, AI057451, |
| | | | | | AI283542, AI224172, AI025510, BF929951, |
| | | | | | AW589256, AU156824, AU155569, BF063133, R43074, |
| | | | | | R25758, BF818086, AL529111, BE567017, |
| | | | | | BE077233, H09061, AA479409, AL136843.1, |
| | | | | | AK001927.1, AK027756.1, AK001324.1, AC009318.11. |
| HBNAX40 | 27 | 834801 | 1-2779 | 15-2793 | BF966078, BF792338, BF034911, BF217973, |
| | | | | | BE883387, BF947401, BF574197, BF060683, |
| | | | | | BE220005, BE645102, AI808818, AU158323, |
| | | | | | BE222311, BE467629, BF985268, AA203305, |
| | | | | | BE504175, BE612371, BE504478, AI890286, |
| | | | | | BF514573, AW173142, AI674096, BE301797, |
| | | | | | AW962903, AI674111, AI935063, AW958697, |
| | | | | | BE931820, AI431629, AI418384, AU157624, |
| | | | | | AW958686, H10461, AW995348, AW511978, |
| | | | | | AA864829, N29528, AI287632, AU157306, |
| | | | | | AW206871, AI381961, BE018315, AW238878, |
| | | | | | R61198, H80193, AA531283, AA565321, |
| | | | | | AW073280, AW026572, AW243789, AI819460, |
| | | | | | AI913516, BE503173, AA305587, AA305897, |
| | | | | | AW952734, BE815642, C01749, H10462, |
| | | | | | R58932, AI040839, T17118, R62976, H17748, H11865, |
| | | | | | R63031, AA970617, AI247608, R63338, |
| | | | | | T07723, AA774553, AA371079, BF084654, AA329699, |
| | | | | | BF802622, AW139568, AW027833, R61199, |
| | | | | | H11505, N57467, R19912, BE695240, R63337, |
| | | | | | R06902, AA337757, R33944, R14158, |
| | | | | | T55659, AA247547, AU140145, AA329948, AI872648, |
| | | | | | H17635, T55578, AI802966, N67275, |
| | | | | | R40453, AA318909, AA039614, AI565257, AI540752, |
| | | | | | AW865932, N46626, R06946, N40466, |
| | | | | | T25153, AI444969, AI262121, H78817, AW150803, |
| | | | | | AI003014, AI457343, N34900, AK023746.1, |
| | | | | | AF264912.1, AF305081.1, AF329696.1, AF342982.1, |
| | | | | | AL356305.11. |
| HBXCX15 | 28 | 637542 | 1-1205 | 15-1219 | AA595781, AW277007, AI274544, AA548746, |
| | | | | | AC006329.5, AC009412.6. |
| HCDBO32 | 29 | 831942 | 1-2616 | 15-2630 | AL537440, AL531001, AL531000, AU118775, |
| | | | | | BE613081, AW976126, BE739778, BE612415, |
| | | | | | BE886668, AW965087, BF671603, BF114976, |
| | | | | | BF001395, BF104843, BG169691, BF790959, |
| | | | | | AU145261, AI524826, AV700940, BF115561, |
| | | | | | AI628083, BE501914, BF028814, BG107506, |
| | | | | | AA456561, BF695399, BF064237, AW771567, |
| | | | | | AI554053, AU152051, AI066556, AI478798, |
| | | | | | BE962627, AW770611, AW963335, BE739003, |
| | | | | | BF064238, AI801476, AI807830, AA913477, |
| | | | | | AI424225, AA227589, BF575758, AA625584, |
| | | | | | AI963182, AW771337, AA576069, AI252762, |
| | | | | | AA070604, BF589915, AV702872, AA428503, |
| | | | | | AA235962, AI539101, AA419520, AA721024, |
| | | | | | BF700344, AI357722, AA314319, AA310761, |
| | | | | | AA235961, AA888687, AA479915, AW300423, |
| | | | | | AA304968, AA912243, AI910898, AI521757, |
| | | | | | AI658537, AI000288, AI244242, AA304963, |
| | | | | | AI583529, AI950641, AI005178, AI254210, |
| | | | | | AA806032, BE177264, BE769195, H26906, AI688879, |
| | | | | | AA832031, AA081596, BF082553, BE699120, |
| | | | | | BF588478, AW888693, AW888689, AA362983, |
| | | | | | BE176881, R33476, AI382821, AA614062, |
| | | | | | AV747748, R34012, AA652453, AV748003, AA343918, |
| | | | | | AA355362, AW965719, AW819087, AA074345, |
| | | | | | AC004987.2, AK021702.1, AC004884.1, |
| | | | | | AB017707.1, AJ012491.1. |
| HCEEE79 | 30 | 560609 | 1-1038 | 15-1052 | AL353658.33. |
| HCEFZ82 | 31 | 831745 | 1-1797 | 15-1811 | BF981465, BF688419, BF969763, BG178653, |
| | | | | | BE730527, AI672493, N21040, BE395792, |
| | | | | | AW386160, BE858812, AI672483, BF530193, |
| | | | | | AI693512, AV751914, BG180158, AI138621, |
| | | | | | BG104179, AA778387, AA173791, BF939691, |
| | | | | | AW615384, AW960851, AW594109, BF091657, |
| | | | | | AI022755, AA209239, AI077708, AI824069, |
| | | | | | AI936432, AI038303, N39250, AI927782, AI457926, |
| | | | | | AI436138, AI056772, AI079503, N58793, |
| | | | | | AI016045, AA210850, AI096581, AA062719, W88815, |
| | | | | | AA725072, AI375410, AA669791, BE300887, |
| | | | | | BF431891, AA173843, W31742, W88816, AI740977, |
| | | | | | BE727603, AI086937, AA704681, AI190844, |
| | | | | | AI341909, AI365029, N46695, BF590052, AV749863, |
| | | | | | AI086941, AI676179, AA826493, AA554932, |
| | | | | | AA789007, BF111593, AA917998, R08679, |
| | | | | | AA889734, W04647, AA321894, AI912831, |
| | | | | | AV750240, AI239655, BF592139, H71960, AI368377, |
| | | | | | AA992261, BE277655, H78240, H78440, |
| | | | | | AI470391, R37067, AV694383, AI700804, R44781, |
| | | | | | AW612991, R10835, H96434, N77482, |
| | | | | | AA314780, R44068, AV751269, R08587, AV697548, |
| | | | | | AI419628, BE218690, N90646, H65409, |
| | | | | | BF530646, AA836620, W26811, R10834, AV660888, |
| | | | | | AV747670, AA905784, AI086303, H84253, |
| | | | | | AI086248, AV723953, BE881061, BG110517, |
| | | | | | BE047952, BG180996, AV682466, BF107905, |
| | | | | | AI312428, BE876038, AW051059, AI538885, |
| | | | | | AV757598, BF752170, BG113385, BF968903, |
| | | | | | BG028873, BG113847, AW301865, AL036802, |
| | | | | | BG033199, AV682875, BG178911, AI345612, |
| | | | | | AV732936, BF924882, AW827285, BE966634, |
| | | | | | BG120492, AI345415, AW827206, BG164371, |
| | | | | | AW827214, AW827276, BF971336, AA568405, |
| | | | | | BG026714, AL118781, BE965758, BE965192, |
| | | | | | BE875407, AI581033, AL041573, BG260037, |
| | | | | | BF835240, AV682330, AI343059, AV760102, |
| | | | | | BG058150, AI361701, BF816811, AV756838, |
| | | | | | AI345416, BF338002, AA614183, AI349933, |
| | | | | | AI340519, AI349937, AI340603, AW129264, |
| | | | | | AV681885, BE887488, BF341801, AV757639, |
| | | | | | BE881134, AW022636, AV682787, AV682672, |
| | | | | | AL036631, BE907151, AL040169, BG034564, |
| | | | | | BF108279, BG110797, BG029053, AV709517, |
| | | | | | AA572758, BE966699, AV757018, BE963838, |
| | | | | | BE875868, BE905726, AW403717, BG114990, |
| | | | | | BG110660, BG116387, BG036846, BF980991, |
| | | | | | AI859991, BG119329, BG260187, AV729627, |
| | | | | | BF915208, AI241901, AW161579, BF911517, |
| | | | | | AI815232, BE895585, AL036396, BF792050, |
| | | | | | AI064830, AW673679, BG111377, AV734765, |
| | | | | | BF814450, AW935969, AW806761, AL045413, |
| | | | | | AL119836, AI698391, BE536058, BF968533, |
| | | | | | BE964614, AW302988, AW827289, BF764538, |
| | | | | | AW778801, AL039086, AV706987, AI433157, |
| | | | | | BE910005, BE048135, AL513943, AV757943, |
| | | | | | BE892325, BE965621, BE967307, AI349645, |
| | | | | | BE874133, BF791952, BG033267, BE965481, |
| | | | | | BG105812, BF527014, BF816685, AW834302, |
| | | | | | AI683395, N71199, AV733682, AI312152, |
| | | | | | BF909758, BC001698.1, AF225418.1, AL133067.1, |
| | | | | | AL049300.1, AL110196.1, AB055368.1, |
| | | | | | AL122050.1, AL096744.1, AF090934.1, AL137529.1, |
| | | | | | AK025958.1, BC006201.1, U42766.1, |
| | | | | | AL133565.1, AF218031.1, AL136640.1, AK026784.1, |
| | | | | | AL117457.1, AK026434.1, BC007199.1, |
| | | | | | AL136787.1, AL389935.1, AL162006.1, S61953.1, |
| | | | | | AB060908.1, AL136790.1, AF097996.1, |
| | | | | | BC007926.1, AB062978.1, AF218014.1, AF090900.1, |
| | | | | | AB047631.1, AB047941.1, AL512733.1, |
| | | | | | AL050393.1, S78214.1, AL357195.1, AB060929.1, |
| | | | | | AL133557.1, BC004908.1, AB055303.1, |
| | | | | | AB060887.1, AF207829.1, AL133080.1, AL133640.1, |
| | | | | | AF210052.1, BC000090.1, AL359601.1, |
| | | | | | BC003120.1, AK026518.1, AL137459.1, BC001293.1, |
| | | | | | AK025015.1, AL035458.35, AF078844.1, |
| | | | | | AL050116.1, BC003683.1, BC008417.1, AB052200.1, |
| | | | | | AL442072.1, AK027868.1, AB060229.1, |
| | | | | | AK026353.1, AB060873.1, AL512746.1, AF111847.1, |
| | | | | | AL133606.1, AK026542.1, AB056427.1, |
| | | | | | AK024992.1, BC001967.1, BC004370.1, AL049314.1, |
| | | | | | AB060837.1, AL050146.1, AL442082.1, |
| | | | | | AK026506.1, AL137527.1, AB049892.1, AF022813.1, |
| | | | | | AL049382.1, AB063008.1, AK027161.1, |
| | | | | | AL359583.1, AK026741.1, AB048974.1, BC006525.1, |
| | | | | | AK026927.1, AL157431.1, AL162085.1, |
| | | | | | AF090896.1, AL122121.1, AL162002.1, AK026583.1, |
| | | | | | AL049430.1, AK026797.1, Z37987.1, |
| | | | | | AL136789.1, AL133016.1, AK000323.1, AL122118.1, |
| | | | | | BC006807.1, AL136749.1, AB055361.1, |
| | | | | | AL137283.1, Y16645.1, AF090943.1, AK026480.1, |
| | | | | | AF285836.1, AK026522.1, AK026630.1, |
| | | | | | AK025708.1, AK025484.1, BC008387.1, AB060826.1, |
| | | | | | AK026086.1, AL133093.1, AB063070.1, |
| | | | | | AK000432.1, AK025339.1, BC004195.1, AF146568.1, |
| | | | | | AL137705.1, AL122123.1, BC003104.1, |
| | | | | | AK000618.1, BC008836.1, AK026855.1, AL136844.1, |
| | | | | | AB056420.1, AB052191.1, AK025092.1, |
| | | | | | AL049452.1, AL117460.1, AF090886.1, AF090903.1, |
| | | | | | AL136845.1, AK024538.1, AL137292.1, |
| | | | | | AL136799.1, AL512719.1, AB047615.1, AK026744.1, |
| | | | | | AB056421.1, AL117583.1, AL442083.1, |
| | | | | | AK024974.1, AK000212.1, AK000083.1, AB056809.1, |
| | | | | | AL110221.1, BC007680.1, AK026452.1, |
| | | | | | AB047904.1, AL353956.1, AF056191.1, BC006195.1, |
| | | | | | AL136784.1, AF104032.1, AF091084.1, |
| | | | | | AL512750.1, AL512718.1, AK026045.1, AB060863.1, |
| | | | | | AF125949.1, AL137488.1, AL390167.1, |
| | | | | | AL080124.1, AL137276.1, AL050277.1, AB048953.1, |
| | | | | | AL512761.1, AL137271.1, AL359596.1, |
| | | | | | AB063046.1, AB055366.1, AF120268.1, AJ242859.1, |
| | | | | | AK025632.1, AL080127.1, AB049758.1, |
| | | | | | AK026924.1, AL137550.1, U72621.3, BC001418.2, |
| | | | | | AK024594.1, AB051158.1, BC006440.1, |
| | | | | | AL049283.1, Y10936.1, AK025375.1, AK025414.1, |
| | | | | | AK025573.1, AB060852.1, AL512689.1, |
| | | | | | AL122100.1, AL583915.1, AL110225.1, AL136892.1, |
| | | | | | AY034001.1, AK026600.1, D83032.1, |
| | | | | | BC007021.1, BC003687.1, AB047878.1, AL136884.1, |
| | | | | | BC008488.1, Y14040.1, BC002839.1, |
| | | | | | AL389983.1, BC008899.1, AK000137.1, AL049466.1, |
| | | | | | AK026959.1, AB048954.1, AB063088.1, |
| | | | | | AL136893.1, BC008282.1, BC004119.1, AL136586.1, |
| | | | | | AF090901.1, AL122093.1, BC008893.1, |
| | | | | | AB060214.1, AL096751.1, BC008365.1, AL080060.1, |
| | | | | | AK027113.1, AB060912.1, AL162083.1, |
| | | | | | AL136767.1, AL049938.1, AL512684.1, BC002647.1, |
| | | | | | AK000445.1, BC006408.1, AF069506.1, |
| | | | | | AK025084.1, BC007556.1, AL133075.1, BC003548.1, |
| | | | | | AL137533.1, BC008078.1, AL136864.1, |
| | | | | | AL137548.1, AF106862.1, BC006832.1, AK026591.1, |
| | | | | | AL133560.1, AK000652.1. |
| HCUCF89 | 32 | 637986 | 1-516 | 15-530 | AI524118, BE277210, AL039145, BF698704, |
| | | | | | BE276480, BE409047, BF698510, BG150796, |
| | | | | | BF666395, AW089101, BF945647, BE274150, |
| | | | | | BF699964, AL038072, AU121417, AI630176, |
| | | | | | AA847952, AW410354, AP001759.1, AC069162.8, |
| | | | | | AC091529.1, AC018787.5, AL138706.9, |
| | | | | | AC006449.19, AP000744.4, AK023598.1, AL513550.9, |
| | | | | | AP001468.1, AC006014.2, AL035691.17, |
| | | | | | AE000658.1, AC005971.5, AC005049.2, AC002543.1, |
| | | | | | AL109743.4, AC005488.2, AL121891.22, |
| | | | | | AL031727.42, AC005182.2, AC006975.2, AK022018.1, |
| | | | | | AC005725.1, AL035405.10, AL158830.17, |
| | | | | | AF053356.1, AC008050.6, AC008962.8, AC007912.6, |
| | | | | | AL137783.12, AL031295.1, AC011515.4, |
| | | | | | AC004089.25, AL161747.5, AL021937.1, AC068640.29, |
| | | | | | AC004098.1, AL139081.21, AE006467.1, |
| | | | | | AC069279.6, AC008055.6, AC013445.8, AC000070.2, |
| | | | | | AC006050.1, AL022326.1, AL391646.12, |
| | | | | | AC020658.6, AL121601.13, AC005104.1, AP000946.3. |
| HCWAE64 | 33 | 535893 | 1-457 | 15-471 | AL043265, BE895962, BF091850, BF924502, |
| | | | | | BF930204, AW973724, BE906549, BF972009, |
| | | | | | AA558125, BG163769, AW993087. |
| HCWUL09 | 34 | 834722 | 1-747 | 15-761 | AL138741.13. |
| HDPDI72 | 35 | 897277 | 1-1536 | 15-1550 | AV717810, AC018828.3, AC011464.5, AC022383.3, |
| | | | | | AC022384.4, AC034193.4, AC002472.6, |
| | | | | | AC021015.4, AC008119.6, AL356299.16, AC004951.5, |
| | | | | | AC018808.4, AF003626.1, AP000215.1. |
| HDPFY18 | 36 | 779450 | 1-2173 | 15-2187 | AW792967, R41077, BF921165, AV750453, |
| | | | | | AA729108, AA715505, AW975570, AA714451, |
| | | | | | BF826980, AW999989. |
| HDPIE44 | 37 | 899328 | 1-4101 | 15-4115 | AL528314, AU130887, BE780963, BF966718, |
| | | | | | AL118570, BE739397, AU126476, AU139315, |
| | | | | | BF512830, BG115027, BE880693, AI908306, |
| | | | | | BF791388, BF035925, BF540985, AU122664, |
| | | | | | AV724420, AI672418, BF665031, BF057158, |
| | | | | | BF206660, BG120429, BE738855, BF129883, |
| | | | | | AW959181, BF106186, BF966523, BF213412, |
| | | | | | AI042351, BF211302, AL042137, BF515714, |
| | | | | | BF206917, BF031857, BF131974, BF129874, |
| | | | | | BE514139, AV696443, BF037314, AV661523, |
| | | | | | AW130577, AA424461, AW130565, AA902916, |
| | | | | | AU127429, BF677116, AU150429, BF665735, |
| | | | | | AA983275, AI239435, BE155330, AV705068, |
| | | | | | BF212900, AV710135, BF432386, BF057834, |
| | | | | | BF211687, AA461260, AA312396, AI627321, |
| | | | | | AI160503, N63373, BE502195, AV751301, AI884925, |
| | | | | | BE468064, BF513143, AV750990, AA186321, |
| | | | | | BF184200, BE559625, AA749086, AW025721, |
| | | | | | AU152756, AI418879, AA402517, N26419, |
| | | | | | AA088855, AI042350, BE268734, AI761107, AI819134, |
| | | | | | AA678020, AU150014, AA113363, AW341372, |
| | | | | | BF184441, AI457727, AA649198, BE674349, |
| | | | | | AA888970, AA580858, AA199866, BE270920, |
| | | | | | AV649723, H24854, AA100701, AW025691, |
| | | | | | BE836719, BG010680, BE550985, BE087003, |
| | | | | | AA326555, R77878, AA424417, AA188173, |
| | | | | | AL044709, H05951, BF792719, BF930036, |
| | | | | | N56631, N41679, BF923482, H45855, AI218982, |
| | | | | | AW779309, AV751002, BE089649, C17343, |
| | | | | | BF081703, R81295, AA502426, BE646243, BE931964, |
| | | | | | AW594429, BE676875, R11716, BF748564, |
| | | | | | H06000, AA460953, BE832883, AV703744, AI265945, |
| | | | | | AV751157, BE720186, AW021533, T09412, |
| | | | | | BF849176, AA088766, AA437111, AA336899, |
| | | | | | BE262777, AA358792, BE155518, H99315, |
| | | | | | BG166471, BE270762, BE313275, BF239379, |
| | | | | | AA888732, BE825194, T89695, D78877, |
| | | | | | AI269641, BG011279, AI469067, AW874055, AW338714, |
| | | | | | AW874611, N88500, BF445639, AW058314, |
| | | | | | BE677169, AW139207, R17691, T31819, AW513547, |
| | | | | | AW472793, AA358708, AV660383, AI765491, |
| | | | | | AI582998, AI084965, AA598573, AV750235, |
| | | | | | AA730781, R44452, D61165, AA716555, |
| | | | | | AA056000, AA322246, R08530, AA333655, BE972774, |
| | | | | | BE169279, AI870585, BE615699, AI870612, |
| | | | | | BE169269, AI678506, AI640581, AA648833, R08529, |
| | | | | | BE383572, BE247425, BF155632, R19666, |
| | | | | | AW993917, D62489, BG028138, AL040103, AA360932, |
| | | | | | AI763357, AI652881, BF088332, BE327501, |
| | | | | | AL528313, AA055971, AV749018, AV748843, |
| | | | | | AA088700, AI570710, AA004833, AI685231, |
| | | | | | AA178900, AI886543, BE812475, AW166705, |
| | | | | | BE812487, T89515, AA347000, D60417, |
| | | | | | BE937678, AW054783, BE812457, T48558, AA953749, |
| | | | | | AI199099, AI769397, AI369907, AA199752, |
| | | | | | BE701083, BF914380, BF508221, BE838996, |
| | | | | | BE707763, AV646433, BE819207, AV651409, |
| | | | | | T25765, AA113444, AB018353.1, AK022816.1, |
| | | | | | AK025737.1, AF202724.1, AK022469.1, AF064854.1, |
| | | | | | AL133074.1, AA188877. |
| HDPIU94 | 38 | 813352 | 1-2182 | 15-2196 | AU140297, AL529544, AL529545, AU124978, |
| | | | | | AI740820, AU116885, AU126162, AW960772, |
| | | | | | AI565169, BF111956, BG251247, BG177689, |
| | | | | | BE780814, AI628285, AA482031, BE784432, |
| | | | | | AA947029, AW954823, AW190175, AA315300, |
| | | | | | AU143854, AA707674, AI332610, N50136, |
| | | | | | AU148736, AU127152, AW768480, BF947113, |
| | | | | | AA223261, AW955931, AI276839, AA189165, |
| | | | | | AA804584, AA767472, AA223378, AA894857, |
| | | | | | AA252718, R46372, AA939277, N59367, |
| | | | | | AA219127, AA774827, AV762911, BE546354, |
| | | | | | N72682, AA219510, AV761697, AA872005, |
| | | | | | AW188325, W02461, R21326, AI923716, |
| | | | | | D29223, R68368, BF771937, BE769443, AA322537, |
| | | | | | R08745, AA417592, R08746, AW952240, |
| | | | | | AA299861, AW377015, AA337351, H60482, N76470, |
| | | | | | BF088734, AA218745, AA336556, BE896274, |
| | | | | | AI810734, AW118290, BF380800, T30177, D29202, |
| | | | | | BF910258, AA337527, AA336555, R68574, |
| | | | | | AI167609, AA376922, AW968355, BF351657, |
| | | | | | AI832198, AW972092, AW968356, AW972093, |
| | | | | | AW968729, AI432644, AI623302, AW971740, |
| | | | | | AI432654, AI432650, AI432653, AW081103, |
| | | | | | AW858522, AW972091, AW969229, BE672759, |
| | | | | | AW972090, AI432677, AI431230, AI431307, |
| | | | | | AI431316, AI431328, AI431353, AI431312, AI432655, |
| | | | | | AI431310, AW128900, AI431238, AL045327, |
| | | | | | AI431354, AI432666, AA580821, AI431347, |
| | | | | | AI431315, BF448552, BE672748, AI432661, |
| | | | | | AL134524, AI431323, AI431337, AI432675, AI431321, |
| | | | | | AI492519, BE672745, BE672732, AI431246, |
| | | | | | BE672719, U46344, AI431235, AI431243, AI432647, |
| | | | | | AI432651, BE672738, AI431255, AI432674, |
| | | | | | AI431330, AI432649, BE672767, AI791349, |
| | | | | | AW601637, AI431248, AI431241, AL042842, |
| | | | | | AI431254, BE672774, AI431357, AL042729, |
| | | | | | AI432672, AI432665, BE672742, AL042931, |
| | | | | | BF589777, AI432662, BE672627, AW577201, |
| | | | | | AI431345, BE672644, AL042655, AI431351, |
| | | | | | AL042508, AI431231, AI431346, AL042853, |
| | | | | | AI432676, AI432673, AI432658, AW128884, |
| | | | | | AI431257, AW577199, AL042533, AL043166, |
| | | | | | AL047611, AI431340, AL135012, BE672622, |
| | | | | | BE672792, AI432657, AL042802, AW128846, |
| | | | | | AI431247, AI432664, AI432645, BE672718, |
| | | | | | AL042787, AL042515, AL042832, AI431751, |
| | | | | | AL043295, AI431314, AI492520, BE672634, |
| | | | | | BE672743, AI355008, AI492510, AL042898, |
| | | | | | AI431350, AL043091, AI431318, BE883591, |
| | | | | | BG167830, BE672749, BE672744, AI682915, |
| | | | | | AL040207, AW128897, AI866786, AW129223, |
| | | | | | AL042488, AI432643, AL043278, AK022626.1, |
| | | | | | BC001240.1, AK001284.1, AF064854.1, AL133074.1, |
| | | | | | AL133053.1, AL136763.1, AL133049.1, |
| | | | | | AL133076.1, AL122101.1, AL136755.1, AL136758.1, |
| | | | | | AL133068.1, AL136825.1, AL133051.1. |
| HDPPD93 | 39 | 637588 | 1-687 | 15-701 | AI767544, BF963878, AW391604, AW371053, |
| | | | | | AW391605, AW380560, BE150935, AW380557, |
| | | | | | AW609397, AV647627, AW609527, AV647628, |
| | | | | | BE150882, AA625481, AV647780, AW582425, |
| | | | | | AW582423, AA053357, Z39028, T31703, |
| | | | | | AI559952, AI962812, AW023035, AW247321, |
| | | | | | AW594578, AW204377, AW135110, AW069029, |
| | | | | | AA737065, R51075, AW294433, AW291912, |
| | | | | | BF511819, AW292027, AI265783, BF063801, |
| | | | | | AI274716, AI191509, AA605269, AI768872, |
| | | | | | BF057534, AI634812, AI698531, AA565825, |
| | | | | | AI275563, AI366661, BE242780, AI538787, AI203337, |
| | | | | | AI565080, AW008059, AW088320, AW073352, |
| | | | | | W73510, AW242351, AI341846, BF222967, |
| | | | | | AA513453, AI346467, AA622940, AI000935, |
| | | | | | AA535424, AI022694, BF592958, AA639759, |
| | | | | | AI679288, AI679864, AI079193, AU147451, |
| | | | | | N56986, AU148991, AI304785, AA134162, |
| | | | | | AW664542, AI337342, AI245649, AI969305, |
| | | | | | AW582354, AI081970, AI262353, AL079933, |
| | | | | | AW976197, AI991639, BF349821, AU159502, |
| | | | | | AW004865, AA665733, AI348128, AI094163, |
| | | | | | AI184073, AU152120, AU149126, AI359191, |
| | | | | | BE552234, AA632288, AA814449, AW362622, |
| | | | | | AU159545, N75380, N49596, BF869959, |
| | | | | | H48051, N70679, BF987335, AI864296, AA928727, |
| | | | | | BE963530, AA617935, AI151119, BF680667, |
| | | | | | AW978110, BE785995, BF913501, AL519088, |
| | | | | | H56669, BF526020, AI668893, AV655645, |
| | | | | | AV714752, AW087445, AW104724, AI538716, |
| | | | | | AL045500, AI564719, AI802542, BG058398, |
| | | | | | AW026882, BG031815, AI433157, BG179993, |
| | | | | | BF812961, AI620284, AI524671, AI857296, |
| | | | | | AI619502, AW118557, AI682841, AI439745, AI934035, |
| | | | | | AL514129, AL036274, AL036361, BG111590, |
| | | | | | AI560099, BE048071, BG260037, AI445432, |
| | | | | | AL036802, BG257535, AV732936, BF970449, |
| | | | | | BF812938, BG110517, AA640779, AI536685, |
| | | | | | AI445025, BG180996, AL514983, AL121365, |
| | | | | | AI521012, AI537677, BE884130, AI475371, |
| | | | | | BG112718, BG113299, AI702406, BG110684, |
| | | | | | AI349004, AI580984, AI687127, AL513907, |
| | | | | | BF032868, AW166970, AI687375, AI625079, |
| | | | | | AI440239, AI349645, AI635461, AL119049, |
| | | | | | AI433976, AW071349, AV753074, AV757018, |
| | | | | | AI285735, AV758209, BG109270, AI271786, |
| | | | | | BF792961, AI498579, BF882343, AI281762, |
| | | | | | AI690480, AI815855, BG170430, AI783504, |
| | | | | | AL043975, AI636456, AI687728, AV682093, |
| | | | | | AV708097, AW302988, AI432969, AW148716, |
| | | | | | AI800384, BG112879, BF924882, AI697137, |
| | | | | | AL514879, AL036396, AL048656, AI500077, |
| | | | | | AW827211, AI282655, AI962456, AW268253, |
| | | | | | AV681618, AV756619, AW086113, BF793244, |
| | | | | | AW129659, BF885675, AV758822, BF816811, |
| | | | | | AV758592, AI799470, AI539780, AI828682, |
| | | | | | AV681869, AI610307, AI612913, AW132056, |
| | | | | | AI872711, AI818683, AI499393, AI493248, |
| | | | | | BE887488, AV713079, AV652906, AI340519, |
| | | | | | AI537303, AW071417, AI475451, AL040243, |
| | | | | | BF107577, AW082040, AL036146, BF038106, |
| | | | | | BG036846, BF726297, AV682849, AK026796.1, |
| | | | | | AK027770.1, AL391244.11, AF251294.1, AL136882.1, |
| | | | | | AK022241.1, AB051496.1, AK026647.1, |
| | | | | | BC008387.1, BC006195.1, AF090903.1, AB055361.1, |
| | | | | | AL117394.1, BC008488.1, AB060826.1, |
| | | | | | AB063070.1, S78214.1, AL117457.1, AK025339.1, |
| | | | | | AK025092.1, AF125948.1, AB060912.1, |
| | | | | | AL359615.1, AL133606.1, AL122050.1, AL049452.1, |
| | | | | | AL157431.1, BC001967.1, AL049314.1, |
| | | | | | AL162006.1, AL137459.1, AL512746.1, AL050149.1, |
| | | | | | AK025958.1, AB055303.1, AB060887.1, |
| | | | | | AL050116.1, AL110225.1, AB048953.1, AB056420.1, |
| | | | | | AL050277.1, AL512733.1, BC008365.1, |
| | | | | | AF106862.1, BC008417.1, AL442082.1, AL117435.1, |
| | | | | | AK027096.1, AL136749.1, AL133640.1, |
| | | | | | AL133016.1, BC003687.1, AL136586.1, AL136787.1, |
| | | | | | AF090934.1, AK025084.1, AK026855.1, |
| | | | | | AL136789.1, AL512719.1, AL137557.1, AL110196.1, |
| | | | | | AK026741.1, AL359601.1, AB049758.1, |
| | | | | | AF090901.1, AL050393.1, AF104032.1, AL162083.1, |
| | | | | | AK026959.1, AK000083.1, AL133075.1, |
| | | | | | AL050108.1, AF225424.1, AF090900.1, AL389982.1, |
| | | | | | BC007021.1, AK026592.1, AK026865.1, |
| | | | | | AL122121.1, AL122123.1, AK000137.1, AL117460.1, |
| | | | | | AL110221.1, AL050146.1, AF090943.1, |
| | | | | | AL133080.1, AF219137.1, AK026045.1, AL359596.1, |
| | | | | | AK026452.1, AL096744.1, AF090896.1, |
| | | | | | AB060863.1, AB063046.1, AK000618.1, AL080124.1, |
| | | | | | AL359941.1, AF218014.1, AL512754.1, |
| | | | | | AL512718.1, AB060916.1, AL049938.1, AL133093.1, |
| | | | | | AK024538.1, AL049466.1, AF078844.1, |
| | | | | | AL136892.1, U42766.1, AK027868.1, AK026608.1, |
| | | | | | AB048954.1, AK026784.1, AL133560.1, |
| | | | | | AL390167.1, AB055368.1, AB055315.1, AB019565.1, |
| | | | | | AL080060.1, AL122093.1, AL133565.1, |
| | | | | | BC003683.1, Y16645.1, AB048964.1, AL389978.1, |
| | | | | | BC006807.1, AB063008.1, AJ242859.1, |
| | | | | | AF125949.1, AF111847.1, AL442072.1, AB056768.1, |
| | | | | | AL137527.1, AL359618.1, AK026744.1, |
| | | | | | AF146568.1, AK000445.1, AB060825.1, AK025772.1, |
| | | | | | BC007199.1, U91329.1, AF091084.1, |
| | | | | | AK025906.1, AL136844.1, AB051158.1, AB047615.1, |
| | | | | | AL117583.1, AB047801.1, AK026534.1, |
| | | | | | AL136799.1, AK026542.1, AL353940.1, BC004556.1, |
| | | | | | BC002733.1, BC008899.1, AK025491.1, |
| | | | | | AL133557.1, AL136768.1, X82434.1, BC001045.1, |
| | | | | | AL117585.1, AK000323.1, AL049464.1, |
| | | | | | AK027113.1, AK026504.1, AF207829.1, AB060908.1, |
| | | | | | AK000212.1, AB062938.1, AL050138.1, |
| | | | | | AK000432.1, AK026583.1, BC004951.1, AB055366.1, |
| | | | | | AK026927.1, AL080137.1, AK000652.1, |
| | | | | | AB052200.1, AL137550.1, AK025391.1, AK026353.1, |
| | | | | | AK026532.1, AL049300.1, AK025967.1, |
| | | | | | AL050024.1, AB060852.1, AL137283.1, AL122098.1, |
| | | | | | AF097996.1, AL512689.1, AL136928.1, |
| | | | | | AL049382.1, AK026533.1, AK025414.1, AK026528.1, |
| | | | | | AB056809.1, AB047904.1, AL136786.1, |
| | | | | | AB052191.1, BC008070.1, AL136845.1, BC002839.1, |
| | | | | | AL049430.1, AK000614.1, AF260566.1, |
| | | | | | AL133113.1, AB056421.1, AK026086.1, AL137271.1, |
| | | | | | AF177336.1, AK027204.1, BC008485.1, |
| | | | | | AK027164.1, AF183393.1, AK024588.1, AK024524.1, |
| | | | | | Z82022.1, AK026947.1, AL122110.1, |
| | | | | | BC008382.1, AK026526.1, AL512761.1, AL137648.1, |
| | | | | | AL137463.1, AL049283.1, AK026630.1, |
| | | | | | AK025484.1, AF271350.1, BC008983.1, AK026480.1, |
| | | | | | AL359583.1, X72889.1, AK027116.1, |
| | | | | | AK027213.1, AK026629.1, AB060929.1, AK025524.1, |
| | | | | | AB050510.1, AK025209.1, AK000647.1, |
| | | | | | AL512765.1, AK026597.1, AL512684.1, BC003548.1, |
| | | | | | AL137538.1, AK026642.1, AK000718.1, |
| | | | | | AL359622.1, AL080127.1. |
| HDTLM18 | 40 | 836057 | 1-511 | 15-525 | T62863, AL049843.18. |
| HE6CS65 | 41 | 762960 | 1-1512 | 15-1526 | BG114804, AV718161, BG115294, BG163956, |
| | | | | | AW362005, AW579708, AA425593, AV732860, |
| | | | | | AA778426, AW367244, AL537244, AW856936, |
| | | | | | BF377273, BE675130, BG119784, BF978611, |
| | | | | | AA194252, AI937228, AW292921, AI222740, |
| | | | | | BF349929, AW856088, AI348188, AW665835, |
| | | | | | AA025880, BF333804, AW005582, AI139606, |
| | | | | | AI126585, AW959277, AI417243, AI339985, |
| | | | | | AI972128, W52543, AA829354, BF333819, |
| | | | | | AI078819, AV752850, AW857034, BE789386, |
| | | | | | AI299395, AW675446, AI083537, AW516855, |
| | | | | | AA035526, AW005637, AA932845, AI088259, |
| | | | | | AI492529, BF375157, AI334135, AI682947, |
| | | | | | AI753237, AI923621, AA425629, BF804458, AI628857, |
| | | | | | AI635633, AI085676, AI580195, AI138968, |
| | | | | | BE350523, AA005425, BF333807, AW102884, W52544, |
| | | | | | AI022376, W39677, AI920867, BF333811, |
| | | | | | AI240384, N49885, AA227905, AI087384, AI302240, |
| | | | | | AI933336, AI670129, N98508, AI268859, |
| | | | | | AA232843, AI221780, AA253379, N71409, AA004925, |
| | | | | | BF761279, AI066394, BF811217, AI302764, |
| | | | | | AA311893, AW571609, AI080166, AI299456, |
| | | | | | AA844294, AI342664, AI147714, AA464423, |
| | | | | | T60255, BF807121, AA765193, H29427, AA876118, |
| | | | | | AW265722, AI074827, AA808646, AA193122, |
| | | | | | H43349, AA233282, AI693779, AI245406, R60024, |
| | | | | | AA005426, AA995705, AW302271, AA934521, |
| | | | | | AI061151, AW366962, H38317, T90537, AI445689, |
| | | | | | W44818, H12893, AI446122, AA253378, |
| | | | | | H78422, AW378644, AI753445, R44689, N99734, |
| | | | | | AW102871, AA719170, AA464422, AA974340, |
| | | | | | H78222, AA934622, AW149309, R68103, |
| | | | | | AW265649, H40537, AA807276, H43181, |
| | | | | | AI277059, T34512, AA430350, BE539364, AI076849, |
| | | | | | AA347001, T81330, BE049268, H26609, |
| | | | | | AW589372, BG231066, AI092386, R24873, R43362, |
| | | | | | Z40090, AA334085, AW378680, N31595, |
| | | | | | H58243, R68147, AA257048, AA004926, H12894, |
| | | | | | AA886683, BF593823, F02035, AI559907, |
| | | | | | AW062917, N49990, H43311, AA295950, AI364249, |
| | | | | | R52133, BF748425, BF804455, AA778257, |
| | | | | | AW379516, T81506, AI080028, AA347002, BF377711, |
| | | | | | T83072, AL134712, H26654, BE082628, |
| | | | | | BF131565, AA227588, BF092102, BE774491, BF092109, |
| | | | | | AI382725, W63710, BF807108, F01928, |
| | | | | | BF858654, W31073, AA169731, AW367337, AA936648, |
| | | | | | AA193460, AW378675, H43212, BE082824, |
| | | | | | BF858661, AW864790, AA946635, T61637, |
| | | | | | AA304629, R17644, BE047631, AI867081, |
| | | | | | T24808, AA293625, R52222, AW890658, AA425423, |
| | | | | | BF929843, BE888442, C02346, Z99943.1, |
| | | | | | AK024700.1. |
| HE8BQ49 | 42 | 589443 | 1-1861 | 15-1875 | W35257, AC009225.3, U49973.1, AF036938.1, |
| | | | | | AL445225.9, AC006142.1, AC006077.1, |
| | | | | | AC008670.4, Z74739.1, AL023755.5, AC008780.6, |
| | | | | | AL445212.9, AL356317.8, AL137244.28, |
| | | | | | AJ271735.1, U70984.1, AF241734.1, AC021506.5, |
| | | | | | AL391868.15, AL162386.17, AC009312.4. |
| HE9CY05 | 43 | 834826 | 1-1033 | 15-1047 | N76568, N54458, H74303, H74302, |
| | | | | | H73373, R02548, H40263, H58326, AI242058, H58715, H73374, |
| | | | | | R02666, AI438986, T80187, AA676653, |
| | | | | | AI022453, T87491, N86939, N88474. |
| HEAAW94 | 44 | 847340 | 1-910 | 15-924 | AA578368, AA492135, BE707438, AI880112, |
| | | | | | AA927112, AW970866, AA368674, AW237957, |
| | | | | | BE560582, BE560540, BE268041, BE513979, |
| | | | | | BE398109, AI525375, BE270770, AF191611.1, |
| | | | | | AF043045.1, AF042166.1. |
| HEBFR46 | 45 | 847064 | 1-1290 | 15-1304 | BF339246, AW957665, BG258103, AW075995, |
| | | | | | BF309372, BE868083, AW576203, BF308177, |
| | | | | | BE881903, BF689190, AI051657, AA311371, |
| | | | | | BG059809, W56301, AW058408, AA102223, |
| | | | | | BE301190, AI091799, R05745, D61582, |
| | | | | | R01123, AA102222, AA375163, BG029189, AW293550, |
| | | | | | AI752483, AA376452, AW275432, BF812696, |
| | | | | | AI439525, AW151541, AW084324, AL121039, |
| | | | | | AW265468, AI702049, AW162314, AW327673, |
| | | | | | AA577706, BE273825, BF940118, AI270280, |
| | | | | | AW148821, AW162332, AA807704, BG059139, |
| | | | | | AA661583, AW238137, AA601674, BG180320, |
| | | | | | AV742390, BE244308, AW410844, AI433952, |
| | | | | | AI828721, AA631915, AL079734, BG152746, |
| | | | | | AW473160, AW021399, AW020094, BE677164, |
| | | | | | AA728954, AI860423, AI039257, BF679568, |
| | | | | | AW243817, AI049999, AW148964, AI538404, |
| | | | | | AI826857, AI753131, AI690379, BE676856, |
| | | | | | AI003469, AV758870, BF214695, AW502688, |
| | | | | | AW631267, AI904840, AA603359, AI251696, |
| | | | | | AI819419, AI090377, AI254508, BE176819, |
| | | | | | AI554399, AA112864, AI355246, AW151848, |
| | | | | | AW962971, AI028148, AI308529, BF868826, |
| | | | | | BF970107, AA507499, AI751698, AL036896, |
| | | | | | AC006483.3, BC000787.1, AK024787.1, AC010616.5, |
| | | | | | AK027150.1, AC004659.1, AL078611.1, |
| | | | | | AK000385.1, AC005519.3, AC009756.9, AC002543.1, |
| | | | | | AC005052.2, AL354836.13, AC016995.4, |
| | | | | | AL023879.1, AC003108.1, AL139824.22, AL121675.36, |
| | | | | | AL358777.12, AC015651.18, AC011444.5, |
| | | | | | AC004966.2, AC011526.7, AC010319.7, AL121579.4, |
| | | | | | AL158040.13, AC007421.12, AC005531.1, |
| | | | | | AL391259.15, AL096701.14, AC002996.1, AC067945.4, |
| | | | | | AL109923.29, Z97183.1, AL133458.19, |
| | | | | | AC010271.6, AF279660.2, AL035086.12, AP000280.2, |
| | | | | | AL445184.11, AC008440.8, AC008848.7, |
| | | | | | AL139809.16, AC018663.3, AP000039.1, AP000107.1, |
| | | | | | AF195658.1, AP000557.2, AC004974.1, |
| | | | | | AC010789.9, AC004552.1, AC004985.2, AL160256.21, |
| | | | | | AC018633.2, AL121897.32, AC090944.1, |
| | | | | | AC020983.7, AP001715.1, AC007374.6, AL117382.28, |
| | | | | | AF207550.1, AC010422.7, AL137852.15, |
| | | | | | AC008635.6, AL035659.22, AP000463.2, AB017653.1, |
| | | | | | AL359236.4, AC005358.1, AL035683.9, |
| | | | | | AL139785.5, AL159168.15, AC000353.27, AC000379.1, |
| | | | | | L35532.1, AL357972.18, AC011479.6, |
| | | | | | AL159990.12, AL138849.12, AC008891.7, AP000555.1, |
| | | | | | AC010530.7, AC008744.6, AC025212.5, |
| | | | | | AL451162.14, AF167081.1, AC007240.2, AC003007.1, |
| | | | | | AL512489.11, AC004673.1, AC004752.1, |
| | | | | | AL138733.15, AL354948.7, AC011740.7, Z85986.1, |
| | | | | | AC005484.2, AC013355.7, AC016596.5, |
| | | | | | AL031711.30, U73636.1, AC006064.9, U91327.1, |
| | | | | | AL031680.20, AC004089.25, AL132640.4, |
| | | | | | AL109935.39, AC010326.6, AC007676.19, AL133229.40, |
| | | | | | AL136228.8, AC018797.4, AL033519.42, |
| | | | | | AL096791.12, AL391139.19, AC002312.1, Z97054.1, |
| | | | | | Z83840.7, AC004821.3, AC002060.3, |
| | | | | | AL139184.8, AC005280.3, AF107885.2, AB032485.1, |
| | | | | | AP000256.1, AF312032.1, AL035705.22, |
| | | | | | AC012379.7, AC020904.6, AC008521.5, AL356214.20, |
| | | | | | AF224669.1, AP000691.1, AC018673.4, |
| | | | | | U07561.1, AC008392.6, AC004263.1, AP002906.2, |
| | | | | | AL031058.1, AL355480.22, AC006530.4, |
| | | | | | AC009362.8, AF258545.2, AL049759.10, AL035249.6, |
| | | | | | AL008582.11, AJ009616.3, AL050404.3, |
| | | | | | AL122020.5, AP000098.1, AL133163.2, AC025166.7, |
| | | | | | AC087311.22, AL513366.11, AL353678.11, |
| | | | | | Z97632.1, AC005041.2, AL121586.31, AC006449.19, |
| | | | | | AC010412.7, AL355336.15, AL022316.2, |
| | | | | | AL353748.13, AC010526.7, AC005911.6, AC016025.12, |
| | | | | | AC084864.2, AC004066.1, AP001748.1, |
| | | | | | AC026120.33, AL050307.13, AP000361.1, AL157372.18, |
| | | | | | AL353710.7, AL049780.4, AC011895.4, |
| | | | | | AC005695.1, AL161937.13, AL354928.9, AC008738.6, |
| | | | | | AC008372.6, AP000503.1, AC002404.1, |
| | | | | | AC008482.5, AL121967.11, AC010378.6, AL449209.2, |
| | | | | | AC026672.44, AL356805.5, AL031662.26, |
| | | | | | AL449143.18, AL034369.1, AF134726.1, AL049843.18, |
| | | | | | AC008623.4, AC072061.8, Z98948.1, |
| | | | | | AC004662.1, U62317.2, AC012476.8, AC008397.7, |
| | | | | | Z98752.16, AL161670.4, AC007957.36, |
| | | | | | AC009399.5, AC008755.6, AF317635.1, AC009812.17, |
| | | | | | AC002546.1, AC003043.1, AC022211.5, |
| | | | | | AC007746.3, AL050335.32, AC005015.2, AC022405.5, |
| | | | | | AC004476.1, AL109804.41, AF001549.1, |
| | | | | | AC016602.6, AL109799.6, AC008044.4, AC004851.2, |
| | | | | | AL049795.20, AL162505.20, Z83851.17, |
| | | | | | AL359541.11, AL031282.1, AC009470.4, AL034422.24, |
| | | | | | AL133332.12, AC005365.1, AL157789.6, |
| | | | | | Z98051.6, AC006151.3, AC024561.4, AC009086.5, |
| | | | | | AC005570.1, AC010679.6, AC009469.4, |
| | | | | | AC008857.5, AC007845.12, AC005091.1, AL132713.11, |
| | | | | | L78810.1. |
| HEOMC46 | 46 | 866171 | 1-925 | 15-939 | AW026120, BF891831, AI498747, AI056326, |
| | | | | | AI075298, AI359561, BF901563, BF901553, |
| | | | | | BF893716, BF894749, BF901561, AI457604, |
| | | | | | BF891852, BF901564, BF901551, BF893717. |
| HFCDW95 | 47 | 847383 | 1-857 | 15-871 | AL529530, AV726582, BG180774, AW952054, |
| | | | | | AA398982, AL537902, BE739764, AV727582, |
| | | | | | AW300512, AV722244, AW029553, AI986473, |
| | | | | | AI950933, BG164817, AV726968, BF588526, |
| | | | | | BF476107, AW770808, BE874188, AA639868, |
| | | | | | BG252620, AI978599, AA142949, AI700677, |
| | | | | | BG059521, AI918056, BE866188, BE738987, |
| | | | | | AI828361, BF185676, BF445290, AA399621, |
| | | | | | BF031768, BF697098, BE785930, BF433181, |
| | | | | | AI380426, AU150075, BF030153, AI380761, |
| | | | | | AI040457, AW302413, AI678823, AA737313, |
| | | | | | AA548083, BE905006, AI273446, AI632020, |
| | | | | | BF001920, BG151519, AI887157, BF446900, |
| | | | | | AI925691, AI304432, AI375004, AA814501, |
| | | | | | AI284941, AI819675, AA708445, AW131704, |
| | | | | | AI478462, AL529529, AI741247, AA969450, |
| | | | | | AI308781, AA136378, BG054885, BG258115, |
| | | | | | BF701370, AI680947, AW148776, AV727838, |
| | | | | | AW304864, BF208666, AA432085, AA279397, |
| | | | | | BF028795, BF028097, N52155, BF031629, D54791, |
| | | | | | BF591720, AA809906, AA155617, BF028402, |
| | | | | | AI803830, AI347883, AA983660, AA604572, |
| | | | | | AI262096, AW236261, AW576520, AA157854, |
| | | | | | AA588204, BF131266, AA088711, AA282014, |
| | | | | | AA702285, AA923508, BE048565, BF667411, |
| | | | | | AW780109, AI262793, BF341242, AA548251, |
| | | | | | AI421476, BF939796, AW194950, AW337256, |
| | | | | | D56471, D52957, AW887069, AI183568, H17142, |
| | | | | | BE565940, AA137224, D52438, AA771875, |
| | | | | | D58681, AA137223, AV725549, AA150656, AA911258, |
| | | | | | AA446770, D54998, R79409, H09565, |
| | | | | | R33682, BF207904, AI613214, AA658190, AI421135, |
| | | | | | BF091420, F00903, BE184725, BE184795, |
| | | | | | D53702, BF448933, AI421134, AI080427, AI612899, |
| | | | | | M78614, BF028440, F00618, F04716, |
| | | | | | BE549554, AI816921, D51012, T35003, AI301723, AA484869, |
| | | | | | AA335305, BE866601, AI498636, H88563, |
| | | | | | AW801803, D52945, BF222159, AW801965, AA514008, |
| | | | | | H22397, AI424765, AI885113, BE896219, |
| | | | | | AI365192, T05851, R77482, AA652212, AA255908, |
| | | | | | AW134716, BF890688, N62323, T07892, |
| | | | | | T36093, BF833829, T31797, BE843694, T32233, F00108, |
| | | | | | AI811601, T30493, BG259677, D56534, |
| | | | | | F00210, R35636, M78491, N41045, AA995329, BF967013, |
| | | | | | BE926012, F02051, AA513039, BE865924, |
| | | | | | BE539516, BF476761, AI890228, BE184726, |
| | | | | | AW837831, AW607908, BF840954, D55509, |
| | | | | | BE811512, AW003098, BE891332, BE888598, |
| | | | | | AW750879, AW630713, BG104880, BF038524, |
| | | | | | AA136287, AA320122, AW138663, AW627379, |
| | | | | | AW028138, AA828915, BE702523, AA256021, |
| | | | | | BF131079, AW236903, R35739, T95736, |
| | | | | | AA912070, AV726830, AW897704, AA629231, |
| | | | | | AW272373, AW798454, AI269580, AA857847, |
| | | | | | AW075519, AI783861, AI367203, AI624293, |
| | | | | | BF885000, BF814450, AI611743, AI670009, |
| | | | | | AI560679, BF970652, AI282355, AL513755, |
| | | | | | AI333104, BE966990, AI868204, AL514511, |
| | | | | | AW089844, AI554821, AL514765, AI799674, |
| | | | | | AW058207, AC006388.3, AB024334.1, AK024230.1, |
| | | | | | AL117438.1, L30117.1, AF217987.1, AL117648.1, |
| | | | | | AL136925.1, BC005805.1, AL136893.1, |
| | | | | | AK026927.1, AL080129.1, BC001045.1, AF090900.1, |
| | | | | | AB052191.1, AL512750.1, AL512719.1, |
| | | | | | AK026164.1, AL389947.1, BC006525.1, BC002409.1, |
| | | | | | BC004310.1, AK025484.1, AL137479.1, |
| | | | | | AF218004.1, AK027103.1, AB048954.1, AL080126.1, |
| | | | | | AL133665.1, AF285836.1, BC001778.1, |
| | | | | | Z37987.1, BC004324.1, AK024546.1, AL390154.1, |
| | | | | | AB047623.1, BC008040.1, BC008649.1, |
| | | | | | AK027121.1, AK027173.1, AK025375.1, AK000421.1, |
| | | | | | U42766.1, BC002457.1, AK000137.1, |
| | | | | | AK025092.1, AF090903.1, Y10080.1, AL355834.4, |
| | | | | | AK024538.1, AF111112.1, AL359615.1, |
| | | | | | BC002444.1, Y14040.1, AB049849.1, AF141289.1, |
| | | | | | AF120268.1, AL080158.1, BC003548.1, |
| | | | | | AL050116.1, AB052200.1, AJ010277.1, BC003682.1, |
| | | | | | BC002733.1, AK026865.1, AF078844.1, |
| | | | | | AK000652.1, AF091084.1, AL080110.1, AK026659.1, |
| | | | | | AL117649.1, AL117457.1, AL389935.1, |
| | | | | | AL049339.1, AK027200.1, AB060888.1, AB060914.1, |
| | | | | | BC007021.1, AC010374.5, AL049464.1, |
| | | | | | AL050277.1, BC005858.1, BC008488.1, AF097996.1, |
| | | | | | AK026480.1, AK027082.1, AB047897.1, |
| | | | | | AF262032.1, S77771.1, AF004162.1, AK026649.1, |
| | | | | | X65873.1, AL133565.1, AL136882.1, |
| | | | | | AL359620.1, AL389983.1, BC007031.1, BC003104.1, |
| | | | | | AK026642.1, AB060873.1, BC004256.1, |
| | | | | | AB063046.1, AK024974.1, AF252872.1, AF352728.1, |
| | | | | | AL117435.1, AC009484.3, X66417.1, |
| | | | | | BC000778.1, BC003627.1, AC074347.8, AC024247.4, |
| | | | | | AB051158.1, BC008284.1, AL136786.1, |
| | | | | | AK025857.1, AC026307.16, AL137258.1, AK027164.1, |
| | | | | | BC009212.1, BC003602.1, AK025435.1, |
| | | | | | AK024855.1, AL136864.1, AL359618.1, AK026647.1, |
| | | | | | AK026593.1, AK000083.1, BC008070.1, |
| | | | | | AF358829.1, AK025119.1, AK025967.1, AK000445.1, |
| | | | | | AB047801.1, BC001056.1, AL355143.17, |
| | | | | | AK026855.1, AF321617.1, BC006412.1, AK027868.1, |
| | | | | | AL096744.1, AK026532.1, AB047615.1, |
| | | | | | AK026542.1, AB050407.1, AB062942.1, BC000751.1, |
| | | | | | AL512718.1, AK000618.1, BC000772.1, |
| | | | | | AF151109.1, BC007926.1, AL117394.1, BC001844.1, |
| | | | | | AF106862.1, AL136774.1, AL512689.1, |
| | | | | | AL161628.9, AF261134.1, BC002958.1, AL162002.1, |
| | | | | | AF353396.1, AK024992.1, AB060826.1, |
| | | | | | AL136622.1, AK027129.1, AK026528.1, AL110196.1, |
| | | | | | AL122050.1, BC004899.1, AF132676.1, |
| | | | | | AB056427.1, BC005168.1, AL137281.1, AF061836.1, |
| | | | | | AF177336.1, AK025958.1, AL117460.1, |
| | | | | | AF305835.1, AF126488.1, AF132730.1, BC008723.1, |
| | | | | | BC002356.1, BC007680.1, AK025524.1, |
| | | | | | AL122118.1, AF146568.1, AF090901.1, AB060214.1, |
| | | | | | BC004181.1, AL050393.1, S76508.1, |
| | | | | | AC008592.4, AK024978.1, AL050155.1, M19658.1, |
| | | | | | AK027105.1, AL137557.1, AL512754.1, |
| | | | | | BC004370.1, BC001093.1, AK025312.1, AK025708.1, |
| | | | | | AK000323.1, AL442082.1, BC002481.1, |
| | | | | | BC000725.1, AL162062.1, BC006159.1, AF090934.1, |
| | | | | | AK027146.1, BC002697.1, AF090943.1, |
| | | | | | AF073483.1, BC008899.1, AF051325.1, AK026959.1, |
| | | | | | AB048975.1, AC010128.3, AL136789.1, |
| | | | | | AL110158.1, BC008417.1, AF179633.1, AL157433.1, |
| | | | | | AL389939.1, AB049848.1, AL080124.1, |
| | | | | | BC003105.1, AK026086.1, BC008387.1, AL162003.1, |
| | | | | | BC003591.1, AK025099.1, AK026590.1, |
| | | | | | BC004265.1, AL512705.1, BC001215.1, Z82022.1, |
| | | | | | BC004202.1, AL512733.1, AL512746.1, |
| | | | | | AK025349.1, AL157483.1, AB049853.1, BC007767.1, |
| | | | | | AB055303.1, BC007674.1, AB060887.1, |
| | | | | | AB049758.1, AF111847.1. |
| HFEBO17 | 48 | 852218 | 1-976 | 15-990 | AW473576, AI089774, AW451782, AW295271, |
| | | | | | AA749033, BE440149, AI949946, AI469900, |
| | | | | | N68539, AW172942, AI872021, AW243195, |
| | | | | | BE858872, AI337875, AI376876, BE327191, |
| | | | | | BF939700, AI363093, AI471556, AI767259, |
| | | | | | BF114982, AI683261, AW028130, AW976177, |
| | | | | | BE349166, AA974484, AW027661, AI683115, |
| | | | | | AW614790, AI421188, AI281604, AW239182, |
| | | | | | AI750006, AW235809, AI493809, AA455090, |
| | | | | | BF878349, W37813, AV650898, F09284, AW193169, |
| | | | | | AA703436, AV649714, AA526238, Z41088, |
| | | | | | AI700797, AW268135, T92246, AV662283, AI916032, |
| | | | | | T17498, F02060, AV650183, BF768675, |
| | | | | | F04236, AA935093, BE884109, AV649952, AA937505, |
| | | | | | AV649940, W37230, AA585284, AV649786, |
| | | | | | AV651140, AW976261, AW365708, AL137741.1, |
| | | | | | AK000272.1, BC001249.1, BC000937.2, AL162084.1, |
| | | | | | AL157494.1, AK027465.1. |
| HFIJA29 | 49 | 839206 | 1-1261 | 15-1275 | AW195543, AI051690, AI927925, AI051699, |
| | | | | | AI434786, AI675823, AW590850, W84675, AI971192, |
| | | | | | AA767204, AI767042, AW139875, AI521899, |
| | | | | | BF195790, AI250256, AA829382, N20059, |
| | | | | | AA215409, H13567, Z38968, AA526451, |
| | | | | | H01273, H13200, R08173, H01182, R82482, AW972928, |
| | | | | | AW207335, BF242637, AL031259.1, AL049844.7. |
| HFKFX64 | 50 | 566835 | 1-765 | 15-779 | AI202664, AB051500.1. |
| HGBER72 | 51 | 826710 | 1-1302 | 15-1316 | AI827764, AW963463, AV728410, AW964231, |
| | | | | | AV705122, AW956640, AW963895, AW956641, |
| | | | | | BF918640, AV702172, AI732151, AW958318, |
| | | | | | AW021917, AV759632, AW974932, AV702109, |
| | | | | | AV704541, AV704467, AV705086, AI962030, |
| | | | | | AV725237, AV711430, AW500029, AW956077, |
| | | | | | BF760919, AV762633, AV703573, BF804385, |
| | | | | | AW962006, AW970877, AW302909, AA905613, |
| | | | | | AV728369, AV763026, AV763058, AV702760, |
| | | | | | AI188390, AV729337, AA644090, AW969743, |
| | | | | | AI358384, AV729272, AV702343, BF750422, |
| | | | | | AW962942, AV726091, AW963497, AV703597, |
| | | | | | AW973992, AW960468, AV709273, AI305766, |
| | | | | | AV762454, AW966064, BF911056, BG236628, |
| | | | | | AW963542, BE063437, BF916934, BF347791, |
| | | | | | AW410354, AI017251, T05834, AV762982, |
| | | | | | AV711465, AW955841, AI279417, BE150580, |
| | | | | | AV762033, AA584489, AA904275, AL040054, |
| | | | | | AV757607, BE019467, AV758903, AV728425, |
| | | | | | AV703063, BF347740, AI963720, AW816516, |
| | | | | | BE294700, AL042373, BE395467, AW963489, |
| | | | | | BE178609, AA720732, AV712092, AW514662, |
| | | | | | AW069769, AW731867, AA574442, AV759557, |
| | | | | | BG029528, AV764259, AF246229, AC007731.14, |
| | | | | | AC005500.2, AC004033.3, AP001725.1, Z98941.1, |
| | | | | | AC005391.1, AL353653.19, U78027.1, |
| | | | | | AL034405.16, AC002301.1, AC004477.1, AL121897.32, |
| | | | | | AL133396.2, AC018638.5, Z83844.5, |
| | | | | | AC020916.7, AL035587.5, AL391241.21, AL096791.12, |
| | | | | | AL096865.28, AC002542.1, AL035422.12, |
| | | | | | AL117694.5, AC008543.7, AC005037.2, AC005841.3, |
| | | | | | AC005756.1, AL133551.13, AL109758.2, |
| | | | | | AL021155.1, AC006241.1, AC011464.5, AC008754.8, |
| | | | | | AL049643.12, AL138740.9, AC007536.9, |
| | | | | | AC020947.6, AC006211.1, AC079602.15, AC011495.6, |
| | | | | | AL136084.11, AL031685.18, AC004771.1, |
| | | | | | AL031432.1, AC008750.7, AC005701.1, AC008044.4, |
| | | | | | AC004840.3, AL139022.4, AL135927.14, |
| | | | | | AC007227.3, AC005821.1, AC004841.2, AC005399.19, |
| | | | | | AC007204.1, AB016897.1, AC083872.2, |
| | | | | | U02532.1, AE006462.1, AC011452.6, AL445685.17, |
| | | | | | AC006958.1, AC061709.25, AF196779.1, |
| | | | | | AJ009611.6, AP000692.1, AC005484.2, AC006345.4, |
| | | | | | AC005921.3, AL391262.3, AL512430.14, |
| | | | | | AC002563.1, AC004815.2, AC006055.1, AC006130.1, |
| | | | | | AC009756.9, AL139188.14, Z85987.13, |
| | | | | | L11910.1, Z81364.1, AL023807.6, AC009086.5, |
| | | | | | AC068799.14, AC004882.2, AK000254.1, |
| | | | | | AC013717.8, Z98257.1, AC008372.6, AL031295.1, |
| | | | | | AC000086.1, AC006543.7, AC008622.5, |
| | | | | | AL157369.7, AL136418.4, AL139054.1, AC008736.6, |
| | | | | | AC002425.1, AL157938.22, AC002565.1, |
| | | | | | AC005833.1, AC004824.3, AC010206.8, AC010422.7, |
| | | | | | AC002133.1, AL132653.22, AL109743.4, |
| | | | | | AP001693.1, AC008395.6, AL449209.2, U73024.1, |
| | | | | | AC011514.3, AL133545.10, AB055358.1, |
| | | | | | AC009488.5, AC010768.9, AC005971.5, AC006451.5, |
| | | | | | AC005666.1, AP000208.1, AP000130.1, |
| | | | | | AC006052.5, AL158141.14, AP000665.5, AF010238.1, |
| | | | | | AC011529.3, AL009178.4, AC006511.5, |
| | | | | | AL122001.32, AC004150.8, AL021918.1, AL133174.15, |
| | | | | | AL158207.15, AC007201.1, AC008745.6, |
| | | | | | AC068533.7, AC009087.4, AP003352.2, AL033383.26, |
| | | | | | AC002472.6, AC006111.3, AL034417.14, |
| | | | | | Z82182.2, AC006312.8, AP000842.4, AC007546.5, |
| | | | | | AL442167.1, AC025447.4, AC009220.10, |
| | | | | | AL121928.13, AL049868.20, AC006544.19, AL022322.1, |
| | | | | | AF348209.1, AC010328.4, AC004821.3, |
| | | | | | AC018926.10, AL034549.19, AC006061.1, AL163285.2, |
| | | | | | AL049843.18, AC019171.4, AL096840.25, |
| | | | | | AL359846.11, AC008551.5, AP000251.1, AC007136.1, |
| | | | | | AF031078.1, AP003475.2, AL354864.16, |
| | | | | | AC010465.7, AC005330.2, AC010368.4, AL121992.24, |
| | | | | | AF045555.1, AL450339.5, AL117352.12, |
| | | | | | AC008101.15, AL445263.6, AF168787.1, AC004913.2, |
| | | | | | AC004816.1, AC011453.4, U91318.1, |
| | | | | | AL449305.4, AL109627.18, AL022327.17, AC004765.2, |
| | | | | | AL049872.3, AC008906.5, AL137918.4, |
| | | | | | AC025457.5, AC025280.4, AF030876.1, AC012594.7, |
| | | | | | AC034193.4, AC005546.1, AC005306.2, |
| | | | | | AL022329.9, AC006483.3, AC007388.3, AP001714.1, |
| | | | | | AC008397.7, AF001550.1, AC018828.3, |
| | | | | | AC003007.1, AP000111.1, AL133347.28, AC010358.5, |
| | | | | | AC009060.7, AF038458.1, AL035696.14, |
| | | | | | AL031587.3, AL359091.10, AC022382.3, AC005180.2, |
| | | | | | AL137792.11, AL109801.13, AL121914.31, |
| | | | | | AF053356.1, AC022211.5, AC009570.13, AL022476.2, |
| | | | | | AC003046.3, AC004686.1, AP002906.2, |
| | | | | | AC019205.4, AC006388.3, AC025593.5, AC002115.1, |
| | | | | | AC011479.6, AC004752.1, AC008269.4, |
| | | | | | AC004836.2, AC005215.1, AL136304.10, AC003108.1, |
| | | | | | AL137145.13, Z95331.2, AC011737.10, |
| | | | | | AL162455.14, AL133246.2, AL034380.26, AP001711.1, |
| | | | | | AC008403.6, AC002044.1, AC026172.3, |
| | | | | | AC008079.23. |
| HGBGN34 | 52 | 648659 | 1-514 | 15-528 | BF589439, AI127070, W95725, AI829385, |
| | | | | | W95768, AA732915, AI183361, AW967153, BE351006, |
| | | | | | BF941150, AI401364, AA321136, AI750875, |
| | | | | | AA321135, BG115775, AA878380, AA724102, |
| | | | | | AW962617, AA368761, AA455370, C00920, |
| | | | | | AC006208.3, AK024425.1, AB029496.1. |
| HGLBG15 | 53 | 701990 | 1-764 | 15-778 | AI377951, AA478899, AL521476, AI970420, |
| | | | | | BF571396, BF690972, AA478780, AI522149, |
| | | | | | BF571271, AA758425, AW956237, BF692249, |
| | | | | | AI954716, AW197154, BF576614, AI631753, |
| | | | | | AI829079, AI765476, H99846, AW274419, |
| | | | | | AI371713, AI951909, AW769338, BF516230, H19109, |
| | | | | | AI925973, AI932682, AI138219, AI301748, |
| | | | | | AI956119, AI755080, AI378559, AI080154, H05933, |
| | | | | | BF000829, AA031313, AW090099, AA736498, |
| | | | | | AA852791, AA852790, AA928061, AI699043, |
| | | | | | AI087918, AI468315, R56048, AI469137, |
| | | | | | AA248855, AW517996, BF541232, BF838384, Z38380, |
| | | | | | BF838382, AI760228, R55989, AL136597.1, |
| | | | | | AC005082.3. |
| HHFEC39 | 54 | 609873 | 1-1288 | 15-1302 | BE178297, BE891680, BE178296, BE178286, |
| | | | | | BE177969, AI817262, BE178117, BE220165, |
| | | | | | AW025400, BE178101, AI377829, C06099, |
| | | | | | BE178000, BF940116, AI422898, AI089906, AA583355, |
| | | | | | AA971743, AA044947, AA044943, AI076496, |
| | | | | | AI299481, AI376081, AA427892, H98616, |
| | | | | | AA618566, AA532381, AI080656, AA884934, |
| | | | | | AW341785, AA730790, AI139706, AW139974, |
| | | | | | AA992454, N99650, AI094082, AA483691, |
| | | | | | AA482694, D62553, AA001089, AI205651, R80152, |
| | | | | | Z36959, AI692586, AW958955, F10610, |
| | | | | | AA516076, AI311975, AI313288, AI379372, AI348747, |
| | | | | | D62481, AI610907, AA513037, AI611925, |
| | | | | | AI784325, BF054671, D62330, BF054866, BF057878, |
| | | | | | AA149057, N71679, AA923038, AW969749, |
| | | | | | BF364372, R43511, D62106, D79281, N83844, |
| | | | | | T75442, BE168027, BE936283, F13013, |
| | | | | | BE043482, AI348789, D62153, BE168085, BE178420, |
| | | | | | BE177858, AL022726.1. |
| HHSDI53 | 55 | 862028 | 1-1263 | 15-1277 | AW994394, AW151201, AW865905, AW865900, |
| | | | | | AW865898, AW866014, AW865891, AI755214, |
| | | | | | AW500684, AI754567, AI754105, AW576251, |
| | | | | | AL042373, AW613805, AW069227, AI923052, |
| | | | | | AI733856, AW341978, AA847499, BE062476, |
| | | | | | BE062478, AW576191, AW023111, AA420546, |
| | | | | | BG059972, AA449997, AW576490, BF911056, |
| | | | | | BF526964, BF828714, AV763026, AV763058, |
| | | | | | AW327624, AV732057, AA579179, AA410788, |
| | | | | | AI358712, AI634187, AU147162, BF691714, |
| | | | | | AW979087, AU146620, BE062545, AW516255, |
| | | | | | BF771349, AW328202, AW500029, BG250044, |
| | | | | | BE676019, AI792529, AW131356, AV703785, |
| | | | | | AW963663, AV763550, AI249688, AW958962, |
| | | | | | T74524, AW502873, AV695478, AW474168, |
| | | | | | AV762430, AI457313, AA828834, AI080307, |
| | | | | | AI962030, AV759518, AW275432, AW819125, |
| | | | | | AW026305, BG110162, AV730440, AI421950, |
| | | | | | AA513851, AI419337, AV730986, AW851405, |
| | | | | | AU144540, AW964231, AV741914, AV760508, |
| | | | | | AI038304, BE968744, AL135377, AI636734, |
| | | | | | AI361090, AV732950, AV754716, AV762009, |
| | | | | | BG036665, AI345654, AA578621, AW970896, |
| | | | | | AW021886, AA515048, AI569100, AA557911, |
| | | | | | AA501461, AL109936.10, AC078815.22, AL079335.29, |
| | | | | | Z69917.1, AP001760.1, AL136172.16, |
| | | | | | AC021752.5, AC009470.4, AC009269.6, AL049856.1, |
| | | | | | AP001169.1, AC008946.6, AC025262.27, |
| | | | | | AL356805.5, Y18000.1, AL162426.20, AC010271.6, |
| | | | | | AL121808.4, AL035587.5, AC005694.3, |
| | | | | | AC011462.4, AL355343.18, AL122001.32, AD000685.1, |
| | | | | | AC004020.1, AL158198.14, AC036103.8, |
| | | | | | AB050050.1, AC009570.13, AC011489.6, AC018636.4, |
| | | | | | AL391280.15, U63721.1, AC025166.7, |
| | | | | | AC004815.2, AL137128.4, AL109984.14, AC004797.1, |
| | | | | | AL133349.7, AC034242.5, AC005004.3, |
| | | | | | AL024498.12, AC010469.7, AC005529.7, AL138824.19, |
| | | | | | AC004805.1, AL136418.4, AL139054.1, |
| | | | | | AC017078.8, AC011737.10, AC083871.2, Z97632.1, |
| | | | | | AL359400.4, AC010654.8, AC005216.1, |
| | | | | | AC005052.2, AC018690.5, AL031670.6, AC007226.3, |
| | | | | | AC005932.1, AP000114.1, AP000046.1, |
| | | | | | AL158207.15, AL121594.6, AC016995.4, AL034372.33, |
| | | | | | AF064861.1, AC008745.6, AP001717.1, |
| | | | | | AL136137.15, AF228703.1, AC068799.14, AC074121.16, |
| | | | | | AP000744.4, AC005086.2, AC007055.3, |
| | | | | | AL132653.22, AC011445.6, AC011450.4, AC004150.8, |
| | | | | | AC008760.6, AC012450.9, AF047825.1, |
| | | | | | AC006451.5, AC005103.3, AC004975.2, AL139316.5, |
| | | | | | AC005089.2, AL135927.14, AC007227.3, |
| | | | | | AL121972.17, AC034251.5, AC025593.5, AC011470.5, |
| | | | | | AP000356.1, AL034548.25, AC021876.5, |
| | | | | | AC008736.6, AC005725.1, AC010279.4, AC004647.1, |
| | | | | | AC087071.2, AC002115.1, AC006552.7, |
| | | | | | AF003626.1, AL137119.26, AC005338.1, AC020916.7, |
| | | | | | AL133240.3, AL161896.16, AL033378.12, |
| | | | | | AL359397.3, AF042090.1, AP001725.1, AL161727.15, |
| | | | | | AL391259.15, AC005200.1, AC009077.7, |
| | | | | | AC008962.8, AP001752.1, AC004867.5, AB053170.1, |
| | | | | | AL117381.32, AC010205.5, AC007722.9, |
| | | | | | AC008440.8, AL354707.17, AC074013.5, AC006449.19, |
| | | | | | AC007993.15, AC005029.1, AC005180.2, |
| | | | | | AC010605.4, AP002852.3, AP001727.1, AC004491.1, |
| | | | | | AL109614.28, AC009068.10, AC006348.3, |
| | | | | | AL096677.21, AC027319.5, AL445483.13, AC008649.6, |
| | | | | | AP000555.1, AF001549.1, AC011510.7, |
| | | | | | AC002316.1, AC006203.1, AC008403.6, AC004755.2, |
| | | | | | AL358815.12, AC006000.2, AC027644.9, |
| | | | | | AC005098.2, AL159159.21, U78027.1, AC073838.6, |
| | | | | | AC002126.1, AC004771.1, AL121653.2, |
| | | | | | AC016587.7, AC005880.3, U91323.1, AL121601.13, |
| | | | | | AC005924.2, AP001053.1, AL022312.7, |
| | | | | | AC007388.3, AC004967.3, AL096840.25, AC004166.12, |
| | | | | | AL354932.26, AP001718.1, AC011465.4, |
| | | | | | AL353679.18, AC010463.6, AL121992.24, AC020754.4, |
| | | | | | AL049610.9, AC006441.13, AC006483.3, |
| | | | | | AC005620.1, AL136039.4, AL031295.1, AC008280.4, |
| | | | | | AC008397.7, AL161907.17, AL035422.12, |
| | | | | | AC004821.3, AC009220.10, AC004895.2, AC009509.7, |
| | | | | | AL137818.3, AC004125.1, AF031078.1, |
| | | | | | AC002352.1, AL356020.3, AC008474.7, AC002546.1, |
| | | | | | AL159997.14, AC007565.1, AL117382.28, |
| | | | | | AP001631.1, AC000082.4, AC007011.1, AC004813.2, |
| | | | | | AC008392.6, AF030876.1, AL137005.6, |
| | | | | | AC013719.8, AC005779.1, AC002401.1, AC002090.1, |
| | | | | | U91321.1, AC025280.4, AL445222.9, |
| | | | | | AC008569.6, AP003475.2, AL031228.1, U95090.1, |
| | | | | | AC016742.10, AL359711.18, AC068533.7, |
| | | | | | AL138836.15, AC004922.2, AC004840.3, AL021579.1, |
| | | | | | AP000694.1, AC005522.2, AF111167.2, |
| | | | | | AL022320.23, AL136220.14, AL031311.1, AL138741.13, |
| | | | | | AL354889.14, AC007664.12, |
| | | | | | AL356747.18, AC000003.1, AC007324.55, AL033397.7, |
| | | | | | AL359552.16, Z83844.5, AC021868.17, |
| | | | | | AL136170.12, AC016894.7, AL136228.8, AC007283.3, |
| | | | | | Z83308.1, AC005236.4, AP002342.3. |
| HISBA38 | 56 | 561711 | 1-1044 | 15-1058 | AA465219, AW968392, AA465303, AL042753, |
| | | | | | AV759518, BF868994, BG029528, BF725761, |
| | | | | | AI963720, AL037683, AA129746, AL041924, |
| | | | | | AV682003, AV763460, AL138455, AL079734, |
| | | | | | AV757289, AI282253, AA669155, BF827410, |
| | | | | | BE252421, AL042853, AV760391, AA760655, |
| | | | | | AL079447, AV760389, AV762395, AA551105, |
| | | | | | AI049643, BG164617, AL137020.13, AC006581.16, |
| | | | | | AL122023.3, AL022322.1, AC007436.1, AC004706.1, |
| | | | | | AC068722.6, AB045357.1, AL035552.9, |
| | | | | | AP002532.1, AC022324.5, AL121869.19, AL109752.13, |
| | | | | | AC020559.4, AC008901.5, AC006017.2, |
| | | | | | AL354943.9, AC073897.6, AL353752.6, AL121823.12, |
| | | | | | AC005798.10, AF117829.1, AC018719.4, |
| | | | | | AL138832.10, AC010722.2, AL358612.8, AL163206.2, |
| | | | | | AL138879.10, AC090710.16, AC005250.1, |
| | | | | | AL365222.24, AL163213.2, AL133517.11, AP000493.1, |
| | | | | | AC005539.1, AL139150.12, AC003029.2, |
| | | | | | AC008766.4, AC009316.3, AC005002.2, AL133244.1, |
| | | | | | AL137818.3, AL031433.4, AC010081.4, |
| | | | | | Z97985.16, Z94722.1, AL590611.7, AC025253.20, |
| | | | | | AL137918.4, AL121652.2, AC073881.3, |
| | | | | | AC004998.2, AL355834.4, AL450345.6, AL163201.2, |
| | | | | | AL137840.12, AL049835.3, AL355143.17, |
| | | | | | AC006466.3, AC002457.1, AL132827.2, AC090957.1, |
| | | | | | AL049697.9, AL109939.13, AL133373.5, |
| | | | | | AC068723.5, Z98754.1, AL356278.8, AL355535.14, |
| | | | | | AC087315.21, AF212831.2, AL023876.2, |
| | | | | | AL359234.4, AL390205.17, AC007683.5, AC010140.3, |
| | | | | | AP002448.3, AC034148.9, AC027129.5, |
| | | | | | AL357272.10, AL023279.1, AC012372.4, AL022152.1, |
| | | | | | AC006287.1, AC006313.1, AC019155.4. |
| HJPBK28 | 57 | 638191 | 1-975 | 15-989 | AL514305, AW293236, AW293727, H05931, |
| | | | | | AA641023, R38502, AI866873, AI401672, BF541631, |
| | | | | | AA809622, AA744709, AW300626, R60656, |
| | | | | | AW300632, AI559711, AW300658, BF591678, |
| | | | | | BF059502, AA433907, BF477999, AI143872, |
| | | | | | BF111052, AA923560, AI023411, AI580975, |
| | | | | | AW192719, AW080271, AI493147, AW242303, |
| | | | | | AW026654, AI569455, AA916462, AI281175, |
| | | | | | AI278657, AI419344, AI278903, AW305204, |
| | | | | | AI863945, BE856987, AA947586, AI954274, |
| | | | | | AI825314, BE551611, AU151920, AI422001, |
| | | | | | AI468214, BF061087, AI769184, AU159402, |
| | | | | | AI921752, AI984143, AW117197, AA446546, |
| | | | | | BE503412, AU153554, BE501613, AI656177, |
| | | | | | AI075679, AI459572, AI739249, AU158932, |
| | | | | | AI962781, BE888552, AI340045, BE328347, |
| | | | | | BG120198, AW952038, AA933635, BF870463, |
| | | | | | BF828427, BE620781, AA304007, AA446399, |
| | | | | | AL137969, BC004415.1, BC007774.1, BC006291.1, |
| | | | | | AK023216.1, AK027624.1, AB040953.1, |
| | | | | | AB045381.2, AF216494.1. |
| HKABU43 | 58 | 838573 | 1-1905 | 15-1919 | BG035820, BG163860, BE779136, BG032640, |
| | | | | | BE546300, BG251357, AI890545, BF798002, |
| | | | | | AW957817, AW957894, BG164329, BE897914, |
| | | | | | AI064868, AW439699, BE868957, AI628884, |
| | | | | | AI538687, BG117638, BE075026, BE075028, |
| | | | | | BE877956, AI890859, AW241402, BF057808, |
| | | | | | AI962251, BE672376, BG254061, AI655998, |
| | | | | | W76094, AW593934, AW206368, AW070698, |
| | | | | | BF592891, BF855200, AI913939, AW242743, |
| | | | | | BE892303, W72889, AW510467, BE502137, |
| | | | | | AW852201, AW468485, AW242300, BE073158, |
| | | | | | BE073145, AI370901, AA076346, BE075023, |
| | | | | | BF761114, AI269861, BE927867, Z19251, |
| | | | | | BF229820, AA912859, AI962408, AA449269, BE869764, |
| | | | | | AA449405, AI125399, AI766912, BG230901, |
| | | | | | BF761369, R82858, BE927921, AI651447, AW852191, |
| | | | | | AW874171, AA313460, BE268347, AI440431, |
| | | | | | AW603030, AA322088, BE503487, AA373986, |
| | | | | | BE927954, BE677880, BE816387, BF679224, |
| | | | | | BE816422, BE927027, BF514420, BE297845, |
| | | | | | BE390905, BE535739, AV762904, AA564527, |
| | | | | | H29863, BE743929, AA369997, AA370398, |
| | | | | | AW957044, AA852197, AB018262.1, BC003633.1. |
| HLYGE16 | 59 | 651339 | 1-738 | 15-752 | AW469203, BF820842, BE218294, AW196671, |
| | | | | | BF447223, AI696980, AW236972, AI027666, |
| | | | | | BF798334, BF807954, BE217850, T59291, |
| | | | | | AI267964, R44968, AW444500, AW295686, AW291949, |
| | | | | | AI928514, AI823933, AU153630, AI139764, |
| | | | | | BE005097, AI948643, BF108749, AI126466, |
| | | | | | AW242784, R49472, AU160792, AW273139, |
| | | | | | AI273589, AW589378, AI274894, BF448101, |
| | | | | | AW510475, AI302181, AI400517, BE550344, |
| | | | | | AI365030, H18516, AI206723, F09161, F09171, |
| | | | | | AI696176, AI992327, F09169, AW051573, |
| | | | | | AA847131, R86756, AU148421, AU154040, AI421825, |
| | | | | | AU159186, AI146780, AI910733, AA868280, |
| | | | | | AA722823, BE504675, AI739531, AU152829, |
| | | | | | AA868452, AI911876, BE552250, AI168680, |
| | | | | | AI954643, AI913116, AW237207, BE502531, |
| | | | | | AI142459, D80575, AW002567, BF939794, |
| | | | | | D80957, AA702863, BF591908, AA455456, AI015316, |
| | | | | | AA922953, AV645338, AA514480, AI420243, |
| | | | | | R86981, AI420270, T59250, BF508779, R60233, |
| | | | | | R51570, AI580357, W86599, AA417873, |
| | | | | | AA085431, AA227559, AA852691, H57046, BF845379, |
| | | | | | AA192359, AI580716, AA455455, AA776815, |
| | | | | | AI140464, AA075296, BE300079, R27183, |
| | | | | | AA814809, AW105331, AA024748, D81100, |
| | | | | | BE620885, BF845381, R27182, BF912382, BE904044, |
| | | | | | BE904041, BE881261, BE965135, AI631590, |
| | | | | | BE551572, AI656791, AA282050, BG055430, |
| | | | | | AA937231, AC025594.5, BC009221.1, AK022910.1. |
| HLYGY91 | 60 | 658703 | 1-626 | 15-640 | AW294783, BE502344, BE222441, AI082255, |
| | | | | | AI031661, AI701563, BF431032, AW340159, |
| | | | | | AI250886, AA164268, AA113365, AW195764, |
| | | | | | AA813476, AI382168, AW044458, AI802164, |
| | | | | | AI149406, BF196258, AU155794, AA479123, |
| | | | | | AI167291, AI436306, AI224847, AI417116, |
| | | | | | AI709346, AI669258, AW772002, AA844518, |
| | | | | | AI282711, AI279738, AW195230, AW959069, |
| | | | | | BF002627, AI560087, AI286319, AI474555, |
| | | | | | AI092394, AA479124, AA243709, AI468637, |
| | | | | | AW991244, AA508073, AA243826, AI468739, |
| | | | | | T62160, AW975954, T61934, BE707630, BE169617, |
| | | | | | BF747189, BE832694, AA746981, AA328991, |
| | | | | | AK023448.1. |
| HMCFH60 | 61 | 654853 | 1-429 | 15-443 | BG029413, AW410249, AL120205, AL527305, |
| | | | | | AI754933, AW410004, AW411240, BE207947, |
| | | | | | AI348361, BG254821, AV717836, AI282565, |
| | | | | | AW015954, AI860745, BF970512, AI279557, |
| | | | | | BG250088, AI301063, AI887607, AW675703, |
| | | | | | AI277972, AI751711, AI610303, AW168266, |
| | | | | | AI954092, AW732241, AI199700, AI310726, |
| | | | | | AA533655, AI219656, BE047165, AI828679, |
| | | | | | AI829142, AI874208, AI741030, AI445423, |
| | | | | | AW339140, AW872712, AW872550, AI310725, |
| | | | | | BE675720, AW276596, BE049270, AA526998, |
| | | | | | AI300518, AI805844, AI814591, AA832328, |
| | | | | | AI927014, AA461097, AW337251, BE393698, |
| | | | | | AI453250, AW009901, AA522451, AI970703, |
| | | | | | AI147456, AI799656, AI866733, AI092937, |
| | | | | | AA526185, AI721118, AI017038, AI613235, AI339100, |
| | | | | | AW148657, AI538694, AW008035, AW269978, |
| | | | | | AI818220, AW130721, AI369774, AW778916, |
| | | | | | AA508660, AI285115, AW118526, AA280728, |
| | | | | | AI803837, AI078009, AI249388, AW274402, |
| | | | | | AA449775, AI741564, AI983830, AI953077, |
| | | | | | AI283484, W94943, AI186921, AA573897, AI078388, |
| | | | | | AA670351, AI423558, AW273429, AA745775, |
| | | | | | BE727124, AI591031, BF732731, AA903469, |
| | | | | | H98073, BF973696, AA628743, AW270071, |
| | | | | | AA987523, N91829, AI144428, AI081865, BG057107, |
| | | | | | BE797291, BE798645, AW899935, N34882, |
| | | | | | BG057959, AA065282, BE910046, W68425, |
| | | | | | AA132945, H26397, AA130713, AI535963, |
| | | | | | AA526103, BF436402, BF924840, AW189969, |
| | | | | | AA813305, F25776, R59097, BF793976, |
| | | | | | AW071554, AA102712, AL527475, W90665, AL533663, |
| | | | | | AL523124, AI246999, AW194200, AA677814, |
| | | | | | AW150820, AA004278, AL533350, AI983597, |
| | | | | | H25535, AI282522, BF941561, BE617576, |
| | | | | | BE613255, BF689583, AL521962, BF568937, R56834, |
| | | | | | AL524248, AI299507, AA805472, H46569, |
| | | | | | AW004802, BF828652, AA580297, AI364662, |
| | | | | | AA703237, AL521083, R56835, AA628330, |
| | | | | | BF570271, BE877417, AI365012, H56058, AA229754, |
| | | | | | AA229480, AA302484, AI918967, AI553849, |
| | | | | | AA373811, BF688841, AA853526, AI560300, |
| | | | | | AW470964, AA682774, BE858486, BF914567, |
| | | | | | AA496495, AI950742, R56673, AA526614, |
| | | | | | AA496620, R96820, AI972733, AA868647, |
| | | | | | AA644220, AA447147, AA228723, BG015338, |
| | | | | | AA887190, AA229233, AI690364, T51235, |
| | | | | | AW075387, AA953331, BG112305, AA713800, |
| | | | | | AI094450, H61569, BF375945, AA449063, |
| | | | | | AI026692, AA159983, BF914242, T73441, AI720505, |
| | | | | | BF336367, F31462, AI827198, AW772776, |
| | | | | | AA614196, AI300639, F18178, R10734, BF336341, |
| | | | | | BE548560, AA858412, BF912964, AA229962, |
| | | | | | AA872093, AI015741, AI051521, AI203695, |
| | | | | | AA978132, AA988865, AA365973, BF948395, |
| | | | | | AI690503, W68523, AA229458, Z38471, AW262508, |
| | | | | | AA736839, BF690492, BE181244, AA007293, |
| | | | | | BE122672, AW182880, BF947488, AW771037, |
| | | | | | AI350873, AA557419, BG016041, AW515865, |
| | | | | | AV697048, R56672, T24559, BF183570, AA923506, |
| | | | | | AF189289.1, BC000702.1, AF176006.3, AF192559.3, |
| | | | | | AF151822.1, AK022783.1, AF090943.1, |
| | | | | | AL512733.1, BC005402.1, BC006091.1, AL359583.1, |
| | | | | | AK027129.1, AK025414.1, BC007462.1, |
| | | | | | BC001967.1, AB060832.1, BC008842.1, AK025435.1, |
| | | | | | AK025113.1, M85165.1, AK027103.1, |
| | | | | | AL353940.1, BC004951.1, AL050172.1, AL389947.1, |
| | | | | | AF056191.1, AK027082.1, BC003651.1, |
| | | | | | AK027136.1, AL389935.1, BC009398.1, AL137530.1, |
| | | | | | BC002370.1, Z37987.1, AK000653.1, |
| | | | | | AK027102.1, AF245044.1, AL080146.1, BC008836.1, |
| | | | | | BC004290.1, AL137459.1, AB056372.1, |
| | | | | | AL137548.1, AL080162.1, AL137533.1, AL137657.1, |
| | | | | | AF232009.1, AB063100.1, AL355713.1, |
| | | | | | AB047878.1, AK026542.1, BC008780.1, AK024594.1, |
| | | | | | BC009395.1, BC004925.1, BC006196.1, |
| | | | | | AF261134.1, AF100781.1, BC001778.1, BC004945.1, |
| | | | | | AL137271.1, AB056421.1, AK024974.1, |
| | | | | | AL080234.1, BC007567.1, BC004264.1, BC004156.1, |
| | | | | | AK026885.1, AF352728.1, AL050155.1, |
| | | | | | BC004899.1, BC002471.1, AK026494.1, AF090900.1, |
| | | | | | BC002476.1, AB052191.1, AL049447.1, |
| | | | | | AB060229.1, BC003587.1, BC007926.1, X59812.1, |
| | | | | | BC000054.1, AL136586.1, AL137550.1, |
| | | | | | AL110159.1, AF026816.2, Y14040.1, AK026528.1, |
| | | | | | AK026480.1, BC008591.1, AL049382.1, |
| | | | | | BC002357.1, AL049314.1, BC004362.1, AF177336.1, |
| | | | | | AL157464.1, M85164.1, AL117460.1, |
| | | | | | AB046642.1, AL137281.1, AL137529.1, AF252872.1, |
| | | | | | AF260566.1, U73682.1, AL110280.1, |
| | | | | | BC002733.1, AL133084.1, BC008899.1, AK026959.1, |
| | | | | | AK027173.1, BC001964.1, AJ010277.1, |
| | | | | | AL136805.1, S76508.1, BC001470.1, AK026649.1, |
| | | | | | AL117587.1, BC003591.1, AK025099.1, |
| | | | | | AB060897.1, AK025092.1, AL512718.1, BC003548.1, |
| | | | | | AK026608.1, BC003052.1, AK026626.1, |
| | | | | | AL136844.1, AK027144.1, AB063046.1, AL353952.1, |
| | | | | | AL117435.1, AL133623.1, AL162002.1, |
| | | | | | BC002399.1, AL049464.1, AL359622.1, BC001166.1, |
| | | | | | BC002752.1, BC007280.1, BC008364.1, |
| | | | | | BC001236.1, AL122050.1, AB060837.1, BC006159.1, |
| | | | | | M86826.1, AB051158.1, AB044547.1, |
| | | | | | AL137711.1, AB060888.1, AL110158.1, AF061795.1, |
| | | | | | AF151685.1, AF274348.1, AF274347.1, |
| | | | | | AK025484.1, AF044323.1, AB062978.1, AL137479.1, |
| | | | | | BC005070.1, BC000077.1, AL122110.1, |
| | | | | | BC003658.1, BC003410.1, BC003637.1, BC004923.1, |
| | | | | | X82434.1, AF353396.1, BC007206.1, |
| | | | | | BC002816.1, BC008649.1, AK026583.1, AB060873.1, |
| | | | | | AL110296.1, AB063074.1, AL117416.1, |
| | | | | | AF217987.1, AK026784.1, AL390184.1, AF271781.1, |
| | | | | | AL137554.1, AK025798.1, AK025239.1, |
| | | | | | AB056809.1, AL136893.1, AL133016.1, BC008840.1, |
| | | | | | AL136748.1, U42766.1, AL136787.1, |
| | | | | | S77771.1, X53587.1, BC007499.1, AF090923.1, |
| | | | | | AL122104.1, AK027193.1, AK027213.1, |
| | | | | | AK025254.1, AL122118.1, BC001082.1, AL080060.1, |
| | | | | | BC005825.1, AB050407.1, BC008195.1, |
| | | | | | BC007255.1, AB060863.1, BC007456.1, AB050421.1, |
| | | | | | BC001045.1, BC006458.1, AB060825.1, |
| | | | | | BC004310.1, BC003602.1, AK026534.1, AL049996.1, |
| | | | | | AL359624.1, U70981.1, AK000418.1, |
| | | | | | AK024533.1, AL117438.1, BC004196.1, BC008686.1, |
| | | | | | AB050510.1, BC008387.1, AB055374.1, |
| | | | | | AB060916.1, U55017.1, BC002631.1, BC000090.1, |
| | | | | | X67688.1, BC005165.1, AK000257.1, |
| | | | | | AL110221.1, BC000570.1, AJ296345.1, AL050393.1, |
| | | | | | AK026631.1, U88966.1, AK026506.1, |
| | | | | | AK026593.1, BC004960.1, BC000778.1, AL117648.1, |
| | | | | | AK000614.1, AL137429.1, AL133637.1, |
| | | | | | BC006147.1, Y16645.1, BC002539.1. |
| HMIAK10 | 62 | 562774 | 1-1050 | 15-1064 | |
| HMIBD93 | 63 | 634227 | 1-1309 | 15-1323 | AL045780, AW590225, AW970178, AI376010, |
| | | | | | AI401550, BF940066, AW072377, AI362753, |
| | | | | | AW005335, AA524093, AW575918, AW592039, |
| | | | | | AI097125, AA514373, AI424874, AA490412, |
| | | | | | R55849, R89670, AA502607, AI361469, |
| | | | | | W60204, R45456, AA906578, BF940638, H17344, W35351, |
| | | | | | AA757050, D52329, AA309188, AA490314, |
| | | | | | AA479853, R45361, AI929199, AA456776, AA394201, |
| | | | | | AA806240, R55770, W32915, AI380329, |
| | | | | | Z38945, AI003744, AA411018, R52109, AI471415, |
| | | | | | AA863370, AW953330, AW866322, BF921092, |
| | | | | | AL048656, BF038804, AW238730, BF904194, |
| | | | | | BG180996, AW075305, N49165, BG117375, |
| | | | | | BF764538, BE966011, BF343568, BE536058, |
| | | | | | BG104775, BG104699, AI684013, BF344691, |
| | | | | | BG121999, BF822127, BE966787, AV759922, |
| | | | | | BF969316, BF904258, BE393551, AI498067, |
| | | | | | BE965121, BF753053, AL039086, BE895765, |
| | | | | | BE886728, AV721967, AI923989, BE254907, |
| | | | | | AW004896, AI648699, AI872914, AI312428, |
| | | | | | BF798503, BE895585, AI636619, AI620056, |
| | | | | | AW059828, BF812459, AW162189, BF835240, |
| | | | | | BE875243, AW411235, BF885000, AL138406, |
| | | | | | AI887775, AW071417, AI961589, AI307557, |
| | | | | | AI611728, BE964876, BE047833, BE966699, |
| | | | | | AV704051, AI950892, AI620639, AW827289, |
| | | | | | BF339322, AI917963, AI810589, AI345677, |
| | | | | | BF792928, AI824375, AI537677, AW410972, |
| | | | | | AL040277, AW084056, AW834302, AL040241, |
| | | | | | AI538885, AW151136, AI270055, AI570966, |
| | | | | | AL040694, AI446373, AI916419, BF856052, |
| | | | | | AI473451, BG110517, BF854113, AW149876, |
| | | | | | BF204484, AA420758, AL036652, AI571511, |
| | | | | | AW411043, BG151388, AI288285, AW409775, |
| | | | | | BE965724, AI002285, BE891101, AW410969, |
| | | | | | BE907440, AI866770, AL043052, AW827115, |
| | | | | | AA572758, BE543089, AL119836, AI955906, |
| | | | | | BF753013, AI889376, BE892572, AI468872, |
| | | | | | AW409931, AI340519, BF960601, BG029053, |
| | | | | | AW858254, AI307734, BF672397, AI521103, |
| | | | | | AL036780, BF818009, BF817392, AI590686, |
| | | | | | AA493647, AI929108, AA853213, AI922901, |
| | | | | | BE878725, AA420722, AI432653, AW167918, |
| | | | | | AW999049, BE965192, BE544111, BE963838, |
| | | | | | BG105895, BE964614, AI570909, BG107576, |
| | | | | | AI378123, AI623941, AI874243, D50977, BE963286, |
| | | | | | AI440263, AW088899, BE963918, BE072233, |
| | | | | | AW858243, AI366549, AI636719, AI539153, |
| | | | | | AL040011, BF813196, AI269909, BE964767, |
| | | | | | BF904180, AI539771, BE962636, AI524608, |
| | | | | | AI349933, BE045182, BE964700, AI866608, |
| | | | | | AI611743, AI249877, BF990167, AW083804, |
| | | | | | AI590423, AI783504, BF829164, AI580190, |
| | | | | | AI696626, AW089006, AI345253, AW935969, |
| | | | | | AI589993, AW059713, AI365256, BF909758, |
| | | | | | BF853807, AV656595, BF337602, BE964497, |
| | | | | | AW411351, AI567582, AL037582, BF816037, |
| | | | | | AL037602, AI564719, BE538466, BF816811, |
| | | | | | BF814761, BF885082, AI249962, BE965432, |
| | | | | | AL138457, BE904911, AI581033, AV698087, |
| | | | | | AW090494, BE965758, BE620444, BE613727, |
| | | | | | AC010913.9, AL136884.1, BC003602.1, AL133016.1, |
| | | | | | AK024538.1, AL117432.1, AL133558.1, BC005678.1, |
| | | | | | AB044547.1, U42766.1, BC004960.1, |
| | | | | | AL110197.1, AK026528.1, AL122098.1, AF218031.1, |
| | | | | | AB048975.1, AL162002.1, AK027868.1, |
| | | | | | BC003410.1, BC007456.1, AK025092.1, AB046642.1, |
| | | | | | BC004196.1, BC004899.1, AK025339.1, |
| | | | | | AK025798.1, AL137281.1, AL133075.1, AL137656.1, |
| | | | | | AB051158.1, BC008364.1, AL137538.1, |
| | | | | | AL512718.1, AF217982.1, AK000647.1, AL137550.1, |
| | | | | | BC005890.1, AK026494.1, Z37987.1, |
| | | | | | AB055368.1, AL136768.1, AL157431.1, AL110280.1, |
| | | | | | AB062750.1, BC003687.1, AF003737.1, |
| | | | | | AB060929.1, AF348209.1, AK025015.1, AK026629.1, |
| | | | | | AL353625.5, Z82022.1, L30117.1, |
| | | | | | AB047904.1, AL389982.1, AK027111.1, AL080060.1, |
| | | | | | AL162083.1, AK027096.1, AL049283.1, |
| | | | | | AL512719.1, AK000432.1, AF069506.1, AL050280.1, |
| | | | | | BC007926.1, AB062978.1, AF162270.1, |
| | | | | | AK026534.1, AF028823.2, BC001774.1, AL359583.1, |
| | | | | | AK024974.1, AB063084.1, AL049452.1, |
| | | | | | AB063079.1, AB060852.1, BC004244.1, AL110228.1, |
| | | | | | AF146568.1, BC007346.1, BC000778.1, |
| | | | | | BC005151.1, AK026533.1, AK027081.1, AL080074.1, |
| | | | | | AK000391.1, AK026462.1, BC008780.1, |
| | | | | | AF090943.1, AF218004.1, AB055374.1, AK027213.1, |
| | | | | | U91329.1, AL389935.1, AB049892.1, |
| | | | | | BC001418.2, AF026816.2, AL122110.1, AL359941.1, |
| | | | | | AL137283.1, AK025391.1, AL136640.1, |
| | | | | | AF217966.1, BC008284.1, AB060908.1, AF217987.1, |
| | | | | | AK025407.1, AB060916.1, AK000212.1, |
| | | | | | AK026855.1, AL137529.1, BC001098.1, AL136747.1, |
| | | | | | BC004556.1, AK026551.1, AY026527.1, |
| | | | | | AL117435.1, AL136787.1, AL136882.1, AL136805.1, |
| | | | | | BC006195.1, X98834.1, AK026408.1, |
| | | | | | AB055361.1, AK024594.1, AL136692.1, BC004529.1, |
| | | | | | AL050024.1, AL049430.1, AL133640.1, |
| | | | | | BC008280.1, AF177228.1, AF183393.1, BC000090.1, |
| | | | | | AB052191.1, AL080127.1, AF090886.1, |
| | | | | | AF056191.1, AL050138.1, AL137479.1, AB060912.1, |
| | | | | | AL512684.1, BC006164.1, AK027200.1, |
| | | | | | BC000317.1, AK000323.1, AL136864.1, AL080126.1, |
| | | | | | BC003122.1, AK026624.1, X72889.1, |
| | | | | | BC001470.1, AB048953.1, AF111112.1, AL050393.1, |
| | | | | | BC003052.1, AL137556.1, BC002839.1, |
| | | | | | AK026583.1, AL136786.1, BC002519.1, AK026630.1, |
| | | | | | AK026526.1, BC007198.1, BC004191.1, |
| | | | | | AK025383.1, AK026592.1, BC008365.1, AC044797.5, |
| | | | | | AL389939.1, AK027116.1, AK024524.1, |
| | | | | | BC002457.1, BC003627.1, AB048994.1, AK026353.1, |
| | | | | | AL122050.1, AB055370.1, AL512754.1, |
| | | | | | AK025209.1, AL389957.1, BC008485.1, AB056809.1, |
| | | | | | AL080162.1, AF090903.1, S77771.1, |
| | | | | | AJ012755.1, AL136749.1, BC007021.1, BC009341.1, |
| | | | | | AL137463.1, AK026542.1, AF090934.1, |
| | | | | | AL137526.1, AL136767.1, AL049382.1, AL117583.1, |
| | | | | | AL512733.1, BC004195.1, AB056420.1, |
| | | | | | AK027204.1, AK025431.1, AL117585.1, AK027160.1, |
| | | | | | AK000291.1, AL359601.1, BC007998.1, |
| | | | | | BC007534.1, AF352728.1, AL080148.1, BC001206.1, |
| | | | | | AL133565.1, AL133112.1, AK000486.1, |
| | | | | | AK026532.1, BC004923.1, BC008387.1, BC002539.1, |
| | | | | | AL110196.1, BC008899.1, AK026642.1, |
| | | | | | BC004265.1, AB060837.1, BC003110.1, AL133081.1, |
| | | | | | AK026959.1, AL136915.1, BC003548.1, |
| | | | | | BC008417.1, AL353935.1, BC006412.1, AK026506.1, |
| | | | | | X53587.1, S78214.1, AK026608.1, S61953.1, |
| | | | | | AF078844.1, AF100781.1, AF358829.1, AF097996.1, |
| | | | | | AL133093.1, BC006509.1, AK025967.1, |
| | | | | | AK026480.1, AB063070.1, AK024545.1, BC002643.1, |
| | | | | | AF218014.1, AL390154.1, D89079.1. |
| HMWJF53 | 64 | 758158 | 1-2274 | 15-2288 | AL520010, AL521909, AL521910, AL520011, |
| | | | | | AL524545, BE300370, AV705059, BG248217, |
| | | | | | BE250720, BG031597, BE250726, BF315262, |
| | | | | | AA524095, AL047607, BE871170, BE871652, |
| | | | | | AW402124, BG168243, BF343529, BF038946, |
| | | | | | BG168526, BE394575, BE560712, AL047608, |
| | | | | | AW574683, BE295900, AW575182, BE543224, |
| | | | | | BF205183, BF569039, AI498950, AA779842, |
| | | | | | BG115998, BE301593, AI453393, BE018107, |
| | | | | | AI628521, AI884947, AW474397, AI814310, |
| | | | | | AW166122, AA566001, AW026116, AI948522, |
| | | | | | AA614479, BE018086, BE540280, BF663008, |
| | | | | | AA886908, AA777831, BG115717, BF114669, |
| | | | | | BE393994, AW182896, AI707682, AW770121, |
| | | | | | AI673011, AI206429, AI092365, AI460223, |
| | | | | | BF793598, BE672939, AA522788, BE294120, |
| | | | | | AI061456, AI223983, BE349928, BE787943, |
| | | | | | AI628305, AW674834, AW673969, BE300207, |
| | | | | | BE328440, AW628266, AW008044, AI002213, |
| | | | | | BE677129, N93597, AI634627, AW402526, |
| | | | | | AI285191, AI283397, BE301576, AI609714, |
| | | | | | BF876020, AI884999, AA970842, BE546816, W25474, |
| | | | | | AW149381, BF111468, BF569107, AW057693, |
| | | | | | BE512675, AW083509, AI810870, AA079217, |
| | | | | | F31081, AW166408, AI436188, BE676788, |
| | | | | | AA766757, BF238323, AW275173, AI632859, |
| | | | | | AI903523, AI634638, C03499, AL524544, |
| | | | | | F37056, AW403327, BF211595, AA995404, AV749582, |
| | | | | | AI144305, AW389810, F28876, BF750860, |
| | | | | | AI810289, AI828051, AI472210, AW250061, R80649, |
| | | | | | AW440840, Z40235, AW517160, Z44278, |
| | | | | | AW090368, AW375219, AW090349, AW772829, |
| | | | | | AI903570, H84736, AW117306, BE091381, |
| | | | | | BF927638, AA687750, AA737588, AA420664, |
| | | | | | AI950768, T30392, BF847712, AA804831, |
| | | | | | AA678498, AA831926, AW468591, BE300112, H85096, |
| | | | | | AA808761, BF750914, AI184352, BF752884, |
| | | | | | AA366790, BF154627, AI092997, T11839, R50472, |
| | | | | | BG222658, AW770421, AA908835, AI637529, |
| | | | | | AA079216, AI624496, R25134, AI707910, R25117, |
| | | | | | R25133, T11840, BE694567, BF229961, |
| | | | | | AW340233, R80446, AA506662, BF858391, AW170083, |
| | | | | | BF437541, AI419480, C01359, BF858392, |
| | | | | | BF799664, AI798595, R25118, AA322284, BF884536, |
| | | | | | AW249449, BF858447, BF748381, BG008303, |
| | | | | | AA858447, BE930295, AA773491, AI433887, |
| | | | | | BF762515, BF737049, C01102, AI375331, |
| | | | | | BF748379, AF229162.1, AF217969.1, AF229163.1, |
| | | | | | AC021016.4, AJ001838.1, AL122111.1, AL136799.1, |
| | | | | | BC006287.1, AJ406937.1, AB063008.1, |
| | | | | | AB048914.1, AK026597.1, AF311287.1, AB063091.1, |
| | | | | | AB060211.1, AB056809.1, AL137527.1, |
| | | | | | AK026624.1, X99226.1, AF217998.1, AF229585.1, |
| | | | | | Z98036.1, AC021019.5, BC008185.1, |
| | | | | | BC001349.1, AL050108.1, AL389935.1, BC006408.1, |
| | | | | | BC009253.1, AL135796.6, AL353957.1, |
| | | | | | AK026551.1, AC024247.4, BC003678.1, AB047901.1, |
| | | | | | AK026571.1, S76508.1, AL513350.9, |
| | | | | | AL136090.12, AF239683.1, AL049423.1, AK026627.1, |
| | | | | | U75370.1, AK025517.1, AL136925.1, |
| | | | | | BC008785.1, AB049852.1, AF369701.1, BC006274.1, |
| | | | | | AB048953.1, AL137523.1, BC000051.1, |
| | | | | | BC006210.1, AK026057.1, BC008723.1, AK026494.1, |
| | | | | | AL136825.1, BC007453.1, AK025383.1, |
| | | | | | AF218033.1, BC000316.1, AB048975.1, AL117649.1, |
| | | | | | BC002985.1, AF202636.1, AL133629.1, |
| | | | | | BC001817.1, AC007172.6, BC002485.1, AL132981.12, |
| | | | | | BC006472.1, AK025541.1, AL117585.1, |
| | | | | | AB056804.1, AF081197.1, AF081195.1, Z49258.1, |
| | | | | | AC069387.8, AL354808.24, BC008040.1, |
| | | | | | AK000568.1, BC007998.1, AF125949.1, BC009113.1, |
| | | | | | AF267994.1, BC004944.1, AL353092.6, |
| | | | | | AP001666.1, BC006807.1, BC005835.1, AL137300.1, |
| | | | | | AK000652.1, AK025378.1, L40386.1, |
| | | | | | AB055271.1, AL133081.1, BC004458.1, BC009390.1, |
| | | | | | AB060867.1, AF044221.1, AB063009.1, |
| | | | | | AB060884.1, AL136586.1, AK026506.1, BC008507.1, |
| | | | | | BC000550.1, AL133093.1, AB060877.1, |
| | | | | | AF132676.1, X69819.1, AF061836.1, AB050533.1, |
| | | | | | BC001099.1, AL137273.1, AK025573.1, |
| | | | | | U51587.1, AJ406933.1, AL050322.13, AC002382.1, |
| | | | | | AL354865.9, AL096709.11, AC069228.26, |
| | | | | | AC018639.8, AL138755.13, AL353807.18, AC079363.19. |
| HNECL22 | 65 | 799541 | 1-2696 | 15-2710 | AI114773, AV708528, AI174910, AI114822, |
| | | | | | AI065060, AI305115, AI207643, AV701391, AI114681, |
| | | | | | AV709313, BE221818, BE677761, AW953876, |
| | | | | | AI743950, AW953822, AI589902, AA886890, |
| | | | | | BG236178, BF591137, AW516553, AI027819, |
| | | | | | BE550036, BE675476, BF684928, AI193143, |
| | | | | | BF447812, BE551855, AW003234, BF115226, |
| | | | | | AI871594, BF589312, AW968116, AF074701, |
| | | | | | BF115270, BG149200, BE669558, AI636074, |
| | | | | | AI186791, AA453707, BE348795, AA459528, |
| | | | | | AI223053, AW293894, AI765135, AA465507, |
| | | | | | BF000591, AA837316, AI342451, AW043650, |
| | | | | | AI344323, AI015206, AA906314, AI675107, |
| | | | | | AI374588, AW629315, AI367638, AI285946, |
| | | | | | BE348663, AI126552, AA459297, AI082415, |
| | | | | | BG058812, AA827913, AI186011, AI493737, |
| | | | | | AA579658, AI439599, AI064752, AI580179, |
| | | | | | AI191379, AA057245, AW978758, AW197214, |
| | | | | | AI273440, AI719270, AW084532, AW167688, |
| | | | | | AW614430, AI400741, AI128538, AI261492, |
| | | | | | AI936977, AI694244, AI392728, H56267, |
| | | | | | BF116001, AI215180, AI091065, AA478846, AI141102, |
| | | | | | AI439574, AI262021, AI439573, AI376357, |
| | | | | | AI347510, AA477065, AI278176, AI094135, AI076690, |
| | | | | | H04614, AI439592, AI065009, BE675923, |
| | | | | | N70205, AW408556, AA447775, AA228012, AI762994, |
| | | | | | AW953823, N90124, N91093, AW016927, |
| | | | | | AI914209, AA116051, AI092840, AW661858, N69573, |
| | | | | | AI246680, AI694653, AI863991, AA779767, |
| | | | | | N72602, AI912117, AA313800, AA962551, H93303, |
| | | | | | H51282, BF929847, AI346284, AI521889, |
| | | | | | R63715, AA342837, AA479942, BF732747, AA465396, |
| | | | | | R74142, AI252135, AA454473, R92925, |
| | | | | | N77670, H04592, AI141789, AI816723, AI204646, R63761, |
| | | | | | W78774, N58304, AI655820, BF062215, |
| | | | | | W02412, BF512624, BF855761, H78806, AI341922, |
| | | | | | H73792, BF591907, AA481390, T50082, |
| | | | | | BF834392, BF742347, H73779, R74118, AI630220, |
| | | | | | AA811993, N39344, R96556, AA939056, |
| | | | | | H56071, BF989488, N63741, H51859, AA927199, |
| | | | | | W26847, H72984, R91506, T50066, |
| | | | | | H66255, AA908836, AI830053, AI351268, H49848, AI858083, |
| | | | | | H92164, BF814618, AA333775, AW303217, |
| | | | | | AI864385, AI382793, AW301915, H27595, H88107, |
| | | | | | AI114652, AA813528, H61504, AW952524, |
| | | | | | Z20785, R91276, R67005, H73791, AI088971, R65623, |
| | | | | | T50019, R68277, AI925217, AA683337, |
| | | | | | AW385241, H88106, AI858078, N52417, AI612859, |
| | | | | | AI201887, H40449, N94063, H66660, |
| | | | | | H71977, AW196541, H69793, H66661, AI133036, AI381768, |
| | | | | | AA369715, R74028, BF446051, AW005811, |
| | | | | | AW151526, AI167780, AI217406, R96511, AA627870, |
| | | | | | R74049, H92165, H91341, AI073965, |
| | | | | | AI133696, AI127197, H91424, H27525, AA419172, AI310713, |
| | | | | | AA410653, R68314, AI127450, T50002, |
| | | | | | W04455, H62478, AA031272, N76050, AA916572, |
| | | | | | AA370598, BE856933, AY032628.1, AF155660.1, |
| | | | | | AF223466.1. |
| HNFAC50 | 66 | 815676 | 1-1428 | 15-1442 | BF888349, AW071725, AA743534, BE783671, |
| | | | | | N57590, N57604, AW305107, AV750698, |
| | | | | | BG003734, D45491, AA485566, BF358205, |
| | | | | | AA504633, AW026010, AW025529, BE512979, |
| | | | | | AI885090, AI475932, BF108880, AW050607, |
| | | | | | AA886335, BF368455, BF109416, AA662803, |
| | | | | | AI375435, AI832600, BE906368, AI393408, |
| | | | | | AI056120, AI244837, AI056614, AW449834, |
| | | | | | AA657904, AA922036, AA643750, AA878578, |
| | | | | | AW197722, AW058170, AW748250, AI560410, |
| | | | | | AA485405, AI749095, BF436871, AI720931, |
| | | | | | AI446208, AF308287.1, AL137403.1. |
| HNGEA34 | 67 | 815678 | 1-1089 | 15-1103 | AP000531.1, AC003064.2, AC002471.5, AC005374.5, |
| | | | | | AL512624.4, AL391119.8, AL132657.33, |
| | | | | | Z83839.1, AC008443.8, AL049849.1, AP001229.3, |
| | | | | | AP001214.3, D87003.1, AL133173.19, |
| | | | | | AC026273.7, AC018696.4, AP000547.1, AL078472.3, |
| | | | | | AC002041.1, AF254983.2, AL163201.2, |
| | | | | | AC013734.4. |
| HNGIV64 | 68 | 561572 | 1-1033 | 15-1047 | AA595803, AV653403, AI886084, AV684943, |
| | | | | | AV695480, AI363970, BF848469, AW380640, |
| | | | | | AV651029, AL049541.24, AC009475.4, AC020910.5, |
| | | | | | AC008556.5, AC067941.7, AC004967.3. |
| HNGKT41 | 69 | 836061 | 1-1034 | 15-1048 | AW862214, AW859811, AW862215. |
| HNGNO53 | 70 | 836063 | 1-811 | 15-825 | R37935. |
| HNHCT47 | 71 | 634691 | 1-607 | 15-621 | AA469441, AA328289, AW972888, AW968156, |
| | | | | | AA502813, T09124, AI821722, AI732162, |
| | | | | | AI821172, AI792063, BE146613, BE146622, |
| | | | | | AU119400, AU119141, AA736713, AA572983, |
| | | | | | AL120694, BE392609, BF676104, AA598663, |
| | | | | | AI798242, BF346320, AA525409, AA834799, |
| | | | | | AW970987, AA525174, BE747883, AI636734, |
| | | | | | BF129921, BE395693, BF869362, BE677425, |
| | | | | | BF345228, BF345114, AA502536, BF747666, |
| | | | | | AA569179, AA482323, BE537881, BF871505, |
| | | | | | AV695478, BF340209, AI824589, AI567106, |
| | | | | | AV719084, AV763603, AA364869, AL079869, |
| | | | | | AA608741, AA468456, AA652059, AI309943, |
| | | | | | AL046620, AL041895, AA621838, AL031728.12, |
| | | | | | AC018828.3, AC022383.3, Z84480.1, AC011737.10, |
| | | | | | AL135839.15, AC083884.6, AC025594.5, |
| | | | | | Z83844.5, AC002470.17, AC007308.13, AL513008.14, |
| | | | | | AC009228.4, AC007597.3, AC006388.3, |
| | | | | | AL096841.6, AF109907.1, AL021546.1, AL133448.4, |
| | | | | | AC005098.2, AC004694.1, AC011461.4, |
| | | | | | AL133245.2, AC004815.2, AC004166.12, AC009488.5, |
| | | | | | AC004846.2, AL161756.6, AC009137.6, |
| | | | | | AC004030.1, AL157823.9, AL031685.18, AC015801.25, |
| | | | | | AC002369.1, AC020931.5, AC022384.4, |
| | | | | | AC010463.6, AC005803.1, AC018712.5, AC008569.6, |
| | | | | | AL035704.9, AL118502.38, AL049760.26, |
| | | | | | AC010378.6, AL353193.7, AC008755.6, AL138759.20, |
| | | | | | AC000360.35, AC007883.3, AC034193.4, |
| | | | | | AC007057.3, AC009475.4, AL049872.3, Z84486.1, |
| | | | | | AC005089.2, Z93020.1, AC011490.7, |
| | | | | | AC005871.3, AC009077.7, AC018808.4, AC007384.3, |
| | | | | | AC008745.6, AL132768.15, AL590762.1, |
| | | | | | AC008481.7, AC020954.6, AC010316.6, AC004967.3, |
| | | | | | AL356257.14, AC005972.1, AL096774.9, |
| | | | | | L44140.1, AC005052.2, AF031078.1, AL121586.31, |
| | | | | | AL391384.18, AL353748.13, AL133371.3, |
| | | | | | AC005081.3, AF030876.1, AC004073.1, AC011736.4, |
| | | | | | AC005067.2, AL159168.15, AL121920.21, |
| | | | | | AC013717.8, AL365364.19, AL022476.2, Z97184.1, |
| | | | | | AC004887.2, AL161670.4, AP001781.4, |
| | | | | | AC010319.7, AC002126.1, Z93015.9, AC009060.7, |
| | | | | | AL391827.18, AC026765.22, AC016027.15, |
| | | | | | AC007685.2, AC012170.6, AC008655.6, AL031651.33, |
| | | | | | AC016830.5, AC008551.5, AC005080.2, |
| | | | | | AC008040.7, AC004965.2, AC008521.5, AC011446.6, |
| | | | | | AP002007.4, AL133294.10, AL356915.19, |
| | | | | | AL157951.5, AC004760.1, AL121890.34, AL355871.5, |
| | | | | | AL136170.12, AC007917.15, AF053356.1, |
| | | | | | AL031681.16, AC011465.4, AC010999.6, AC084864.2, |
| | | | | | AL049576.19, AL132775.29, AP001760.1, |
| | | | | | AC004685.1, AP001725.1, Z75407.2, AC003070.1, |
| | | | | | AL354864.16, AC007881.4, AP000424.3, |
| | | | | | AC010271.6, AC010742.4, AL162430.15, AP002340.3, |
| | | | | | AL079342.17, AP000553.1, AC005841.3, |
| | | | | | AL096700.14, AC011495.6, AL137853.12, AC004799.1, |
| | | | | | AC025588.1, AC008267.6, AC011462.4, |
| | | | | | AC005914.1, AC087071.2, AC022154.3, AL139415.10, |
| | | | | | AC003043.1, AL121926.24, AC004491.1, |
| | | | | | AC011005.7, AL117381.32, AC026805.5, U91323.1, |
| | | | | | AL034422.24, AP003466.2, AL049709.18, |
| | | | | | Z68273.1, AL359092.14, AC005207.1, Z93930.10, |
| | | | | | AC008266.3, AC004382.1, AC007388.3, |
| | | | | | AC009131.6, AL136981.22, AC005082.3, AL122023.3, |
| | | | | | AC083855.2, AL117350.12, AC018801.4, |
| | | | | | AL136305.14, AC010328.4, AL049761.11, AC000025.2, |
| | | | | | AC010422.7, AC078818.19, AC026866.8, |
| | | | | | AC011811.42, AC007842.1, AC005200.1, AL355392.7, |
| | | | | | AC008389.4, AC004883.2, AL139801.17, |
| | | | | | AC011460.3, AL160264.22, AC020552.4, AC011472.7, |
| | | | | | U47924.1, AC018751.30, AB013139.1, |
| | | | | | AC007318.4, Z83838.2, AL121897.32, AL133153.3, |
| | | | | | AP001753.1, AL096840.25, Z93017.6, |
| | | | | | AP000349.1, AC011247.10, AL049869.6, AC004782.1, |
| | | | | | AC090527.3, AC006088.1, AC020928.6, |
| | | | | | AD000812.1, AC011479.6, AL022721.1, AC018695.6, |
| | | | | | AC002430.1, AL139100.9, AC004854.2, |
| | | | | | AL132712.4, AL139002.18, AL162426.20, AL161445.10, |
| | | | | | AC007546.5, AC000026.3, AL109797.18, |
| | | | | | AC020983.7, AC020913.6, X69907.1, AC005620.1, |
| | | | | | AP000350.1, AC010205.5, AF224669.1, |
| | | | | | AC058791.3, AP000352.2, AF011920.1, AC004703.1, |
| | | | | | AC018711.4, AC008623.4, AC006946.20, |
| | | | | | AL035689.26, AC007383.4, AJ400877.1, AC004953.1, |
| | | | | | AL035420.15, AC023880.5, AL159140.4, |
| | | | | | AD001527.1, AC002394.1, AL035072.16. |
| HNHKI74 | 72 | 777856 | 1-803 | 15-817 | AV728309, AV707794, AV706891, AV725423, |
| | | | | | AV704740, AV709273, AV702172, AV701844, |
| | | | | | AV734690, AV683012, AV705525, AV734974, |
| | | | | | AV703460, AV702625, AV702760, AV705299, |
| | | | | | AV732961, AV726754, AV702857, AV706410, |
| | | | | | AV728425, AV764444, AV704467, AV762687, |
| | | | | | AV759295, AV725431, AV707135, AV762870, |
| | | | | | AV727065, AV702659, AV759719, AV759507, |
| | | | | | AV762973, AV761810, AV706448, AV760057, |
| | | | | | AV761107, AV729881, AV759717, AV761489, |
| | | | | | AV761613, AV729947, AV707230, AV762505, |
| | | | | | AV722143, AV755512, AV763558, AV763410, |
| | | | | | AV704541, AV761412, AV702343, AV706814, |
| | | | | | AV709625, AV701499, AV762015, AV760106, |
| | | | | | AV703137, AV707043, AV762706, AV762631, |
| | | | | | AV707067, AV763298, AV762242, AV706025, |
| | | | | | AV733894, AV762852, AV764465, AV756702, |
| | | | | | AV709025, AV728138, AV701739, AV757334, |
| | | | | | AV705436, AW963592, AW955724, AV703844, |
| | | | | | AV704497, AV707654, AW962651, AV729090, |
| | | | | | AV702738, AW962006, AV755888, AV760048, |
| | | | | | AW957644, AW962942, AW963486, AV762009, |
| | | | | | AV761661, AV709897, AV729272, AV708388, |
| | | | | | AV712770, AV702109, AV711430, AV762082, |
| | | | | | AV705086, AV763847, AW958318, AV760908, |
| | | | | | AV725558, AV764034, AW963489, AW961593, |
| | | | | | AW966064, AW963552, AV701613, AW960468, |
| | | | | | AW956077, AW963463, AW962444, AV762067, |
| | | | | | AW953953, AW962268, AV727583, AV756508, |
| | | | | | AV703218, AV759768, AW961330, AV757526, |
| | | | | | AW963625, AV729411, AV705020, AV688823, |
| | | | | | AV710733, AV760724, AV683668, AV759352, |
| | | | | | AV763444, AV705532, AC002302.1, AL031273.1, |
| | | | | | AC005067.2, AC003982.1, AL022165.1, |
| | | | | | AC005225.2, AP001711.1, AC002470.17, AC012476.8, |
| | | | | | AC009060.7, AF196969.1, AC007917.15, |
| | | | | | AL354932.26, AC004148.1, AL359091.10, AC006059.3, |
| | | | | | AC005207.1, AC006312.8, AP001689.1, |
| | | | | | AC004824.3, AC007000.2, AC004840.3, AC011497.6, |
| | | | | | AC005229.1, AC006077.1, AC006480.3, |
| | | | | | AC005058.1, AC022543.2, AC004263.1, Z82184.1, |
| | | | | | AL445483.13, AC005632.2, AF134471.1, |
| | | | | | AC005859.1, AC002477.1, AF258545.2, AL024498.12, |
| | | | | | AC010458.5, AL136418.4, AL139054.1, |
| | | | | | AC002425.1, AC003007.1, AC006111.3, AC003692.1, |
| | | | | | AL096763.14, AL357497.17, AP001714.1, |
| | | | | | AL109743.4, AL118497.9, U15177.1, AL391384.18, |
| | | | | | AC005282.4, AC004089.25, AC011455.6, |
| | | | | | AP000089.1, AL132640.4, AP001630.1, AP000300.1, |
| | | | | | AC010319.7, AL136131.15, AC009137.6, |
| | | | | | AC010679.6, AC005015.2, AC018644.6, AL049761.11, |
| | | | | | D87675.1, AC007308.13, AL161779.32, |
| | | | | | AC005726.1, AC008599.6, AC009470.4, AC006121.1, |
| | | | | | AC011479.6, AP000113.1, AP000045.1, |
| | | | | | AF222686.1, AC004659.1, AC004000.1, AL158040.13, |
| | | | | | AC008745.6, AC004878.2, AL121914.31, |
| | | | | | AC004166.12, AC018755.3, AC019014.1, AC007003.4, |
| | | | | | U17576.1, AC010326.6, AC005052.2, |
| | | | | | AL354707.17, AC006038.2, AL008718.23, AL022476.2, |
| | | | | | AP001725.1, AL031282.1, AC007938.1, |
| | | | | | AL133448.4, AC018663.3, AC007216.2, AL117258.4, |
| | | | | | AC004867.5, AC006014.2, AC008891.7, |
| | | | | | AC007684.3, AC011489.6, AL353716.18, AL022302.10, |
| | | | | | AF312915.1, AC020906.6, AL354696.11, |
| | | | | | AC007991.7, AC007151.2, AC013726.7, AL359828.13, |
| | | | | | AL157838.24, AC005089.2, AC020928.6, |
| | | | | | Z68273.1, AC007021.3, AL161893.24, U91323.1, |
| | | | | | AC004149.1, AC008068.4, AP001717.1, |
| | | | | | AC010956.12, AL356214.20, AC020558.4, AL118520.26, |
| | | | | | AL139809.16, U67810.1, AL137162.25, |
| | | | | | AC003956.1, AL590109.4, AL049758.11, AL365364.19, |
| | | | | | AL392003.11, AL513366.11, Z97054.1, |
| | | | | | AC008395.6, AC013449.8, AL121983.13, AC004099.1, |
| | | | | | AL445687.5, AC004797.1, AC006329.5, |
| | | | | | AL158172.5, AP001695.1, Z95114.19, AC006449.19, |
| | | | | | AC008747.5, AC010388.5, AL049830.3, |
| | | | | | AC007052.4, AL135927.14, AC007227.3, AL022323.7, |
| | | | | | AC025097.41, AC005288.1, AC005808.1, |
| | | | | | AC078818.19, AP001716.1, AC005768.17, AC008551.5, |
| | | | | | AP000116.1, AL161630.12, AC006433.18, |
| | | | | | AL138920.11, AC007546.5, AC006511.5, AC004971.3, |
| | | | | | AC004851.2, AC008736.6, AL139113.21, |
| | | | | | AB038653.1, AC005372.1, AC005546.1, AC004913.2, |
| | | | | | AC008521.5, AC005291.1, AC005081.3, |
| | | | | | AC005255.1, AC007722.9, AL109613.11, AC005080.2, |
| | | | | | AC006120.1, AF141309.1, AL161936.15, |
| | | | | | AC005412.6, AL049713.20, AC018841.3, AC004106.1, |
| | | | | | AC007679.4, AC090426.1, AC013436.5, |
| | | | | | AC008166.2, AC004965.2, AC005098.2, AC008753.8, |
| | | | | | AL161757.4, AC008622.5, AC016691.10, |
| | | | | | AL136123.19, AC010519.6, AP002342.3, AC055731.22, |
| | | | | | AC006345.4, AC007066.4, AL158830.17, |
| | | | | | AC002544.1, AC011465.4, AC005519.3, AP000210.1, |
| | | | | | AP000132.1, AL021877.1, U95739.1, |
| | | | | | AL137017.9, AC005488.2, AC022211.5, AL355480.22, |
| | | | | | AL031587.3, AL031289.1, AC005995.3, |
| | | | | | AL353597.20, AC011462.4, AL138762.20, AC010976.5, |
| | | | | | AC006538.1, AC002310.1, AL161747.5, |
| | | | | | AL050332.15, AL034420.16, AC009477.4, AC005695.1, |
| | | | | | AL356481.16, AJ277546.2, AL138725.19, |
| | | | | | AL445237.16, AC006208.3, AJ009613.4, AF288742.1, |
| | | | | | AC007282.4, AC011443.6. |
| HORBS82 | 73 | 638293 | 1-1111 | 15-1125 | AA716165, AW014086, AI675797, AI915560, |
| | | | | | AI093476, AI619556, AA346257, BG170965, |
| | | | | | AI674463, AI656676, AW962578, H26720, |
| | | | | | F32296, F33070, F24055, F23333, F32966, AI370391, |
| | | | | | AI446003, AI560806, AA857847, AW130863, |
| | | | | | AI282355, AI241901, AI889818, AI611743, |
| | | | | | AW243878, AI619502, AI630928, AI953765, |
| | | | | | AW083804, AA504514, AW081179, AA814782, |
| | | | | | BE967273, AI554821, AI620056, AI285735, |
| | | | | | AW262983, AI355849, AI245332, AI018686, AI635464, |
| | | | | | AW183620, AW020095, AL036187, BE966547, |
| | | | | | BG105445, AL036509, AI680498, BF970652, |
| | | | | | AW149869, AI433611, BG181012, BF914091, |
| | | | | | AI271796, BE621256, AV702932, BE962857, |
| | | | | | AI824557, AA555145, AA449768, AL513697, |
| | | | | | AW089009, AI368579, AW020592, AW130403, |
| | | | | | AL514823, AW022494, AW020288, BE785348, |
| | | | | | AL513817, BG108350, AW073996, AA937558, |
| | | | | | AV724929, AI863321, AI684127, AW075648, |
| | | | | | AW082997, AL514035, AI811911, AW168485, |
| | | | | | AV705811, AW083825, AI972170, AI537045, |
| | | | | | BE964576, AV734654, AI815239, BE964792, |
| | | | | | AI434833, AI301507, AI687168, AI289791, |
| | | | | | AL513693, AA808175, AL513911, BF763498, |
| | | | | | AI918634, BE965014, AI623736, BE965891, |
| | | | | | AI952249, AI862139, AW081343, AI923768, |
| | | | | | AL513809, AI050666, AI367210, AW170725, |
| | | | | | AA835947, AW025412, AW082040, AW025279, |
| | | | | | AW079045, AL513789, AI432532, AI874189, |
| | | | | | AI289608, AI536685, AI680113, BE965031, |
| | | | | | AW189268, AW827211, AW082623, BE965053, |
| | | | | | AI560023, AI439762, AW029611, AI978720, |
| | | | | | H89138, AI801592, BF339322, AA603709, |
| | | | | | AV659322, AI925404, AI627714, AW008090, |
| | | | | | BE735370, AW075519, AI866691, AI559737, |
| | | | | | AI921753, AI718161, AI582932, AI872545, AI446809, |
| | | | | | AA904121, AI251434, AI784214, AL514357, |
| | | | | | AW193467, BF338782, AA983883, AA480074, |
| | | | | | AW075482, AL514473, BG179586, AL514557, |
| | | | | | AI804983, AI697045, AL514691, AI924971, |
| | | | | | BF338027, BE299813, AW085373, AA514684, |
| | | | | | AL513553, BE966571, BE963909, BE964150, |
| | | | | | AI915207, BG178911, AI469516, AW151835, |
| | | | | | BF968679, AI475394, AI568114, AL514627, |
| | | | | | AW151850, AI457369, AI824648, BF038804, |
| | | | | | BE965481, AI375730, AW085667, AW192245, |
| | | | | | AA493923, AW059713, BF025686, BE878953, |
| | | | | | AI640379, AI498579, AI888665, AL038778, |
| | | | | | AW162189, AL515235, AI744243, AI691088, |
| | | | | | AW073868, BE964967, AI933940, BE613727, |
| | | | | | BE875442, AL514929, AW161202, AI961590, |
| | | | | | AI680435, BF968622, AI873638, AI863082, |
| | | | | | AL514455, AI915295, AL514101, AI859644, |
| | | | | | AW088944, AW089327, AI658566, AW806761, |
| | | | | | AI564186, BG179099, BF526494, AL513723, |
| | | | | | AL514983, AI811168, AL514089, AL514871, |
| | | | | | AW082060, AI925463, AL513779, AI952542, |
| | | | | | AI285439, AL514409, AI812107, BF971669, |
| | | | | | AI619751, BF904248, AI635478, AL514721, |
| | | | | | AL513999, BG105501, AI628325, AW020710, |
| | | | | | BF525392, AL513823, AI745713, AL034419.22, |
| | | | | | AK027081.1, BC002777.1, BC004926.1, |
| | | | | | AB063046.1, AF090900.1, AK000598.1, BC003591.1, |
| | | | | | BC003682.1, AK025099.1, AB047953.1, |
| | | | | | AL353957.1, AC004987.2, BC002495.1, AK025906.1, |
| | | | | | AF303581.1, AF178432.1, AC008592.4, |
| | | | | | BC003410.1, AK026528.1, AL133088.1, BC008708.1, |
| | | | | | AB060826.1, AB048910.1, BC004943.1, |
| | | | | | AB063071.1, AL050170.1, BC000799.1, BC005805.1, |
| | | | | | BC006164.1, AL136789.1, AL162062.1, |
| | | | | | AK026045.1, BC007517.1, BC003687.1, BC009311.1, |
| | | | | | AB052191.1, AL121916.14, AL389935.1, |
| | | | | | BC001294.1, AK027121.1, AB050510.1, AK026590.1, |
| | | | | | AL080074.1, BC001470.1, BC001236.1, |
| | | | | | BC002373.1, BC001328.1, AB060929.1, AL353956.1, |
| | | | | | AK000636.1, AL359624.1, BC004908.1, |
| | | | | | AB055303.1, BC007522.1, AB060887.1, BC006832.1, |
| | | | | | AJ004832.1, BC000066.1, S77771.1, |
| | | | | | AJ406937.1, BC001418.2, AK025375.1, AF179633.1, |
| | | | | | BC008649.1, AF245044.1, AK000432.1, |
| | | | | | AF141289.1, AB049892.1, BC008718.1, AK024974.1, |
| | | | | | AK027142.1, BC008983.1, AC007383.4, |
| | | | | | AL133640.1, AL137523.1, BC007453.1, AL137480.1, |
| | | | | | AP001346.1, AL110221.1, BC000054.1, |
| | | | | | AL137495.1, AL136925.1, AC004213.1, AL161802.15, |
| | | | | | AC006112.2, AL354828.12, AL035458.35, |
| | | | | | BC009033.1, BC001774.1, BC007248.1, BC005816.1, |
| | | | | | AL122111.1, AK027193.1, AF369701.1, |
| | | | | | AK026551.1, AL035407.15, AL356859.12, BC001801.1, |
| | | | | | BC002752.1, Y00093.1, BC006345.1, |
| | | | | | AK024747.1, AB049758.1, AK026855.1, AK024538.1, |
| | | | | | U77594.1, AB060229.1, BC007031.1, |
| | | | | | AK026542.1, AL080057.1, BC000008.1, BC000386.1, |
| | | | | | AK026480.1, AK025084.1, AL157464.1, |
| | | | | | AL080127.1, AL137705.1, AL121601.13, Z49258.1, |
| | | | | | BC002733.1, BC002491.1, AB049848.1, |
| | | | | | AF217973.1, AF239683.1, BC002409.1, AC006451.5, |
| | | | | | BC003105.1, AL157360.8, Y14040.1, |
| | | | | | AL389978.1, BC002839.1, BC009395.1, AF067420.1, |
| | | | | | AP001731.1, AK027154.1, AB060881.1, |
| | | | | | BC002471.1, AL137711.1, AB050431.1, AK024855.1, |
| | | | | | AF274348.1, AF274347.1, AF352728.1, |
| | | | | | BC006087.1, AL353940.1, AF004162.1, AL050092.1, |
| | | | | | AL136787.1, S76508.1, X53587.1, |
| | | | | | AF232935.1, AL132985.4, BC004481.1, BC008507.1, |
| | | | | | BC002344.1, AF094850.1, AP001666.1, |
| | | | | | BC001099.1, BC004431.1, AL133010.1, Z94277.1, |
| | | | | | AL137556.1, BC002399.1, BC003104.1, |
| | | | | | AK025209.1, AF110640.1, AF120268.1, BC008788.1, |
| | | | | | BC007534.1, AK026038.1, AC008507.8, |
| | | | | | AC026307.16, AC007172.6, AL031732.8, AC017082.4, |
| | | | | | AK026749.1, AF012536.1, BC007053.1, |
| | | | | | BC009026.1, BC002444.1, AF218014.1, BC001785.1, |
| | | | | | AC002540.1, AF225424.1, AK025414.1, |
| | | | | | AF217987.1, BC007355.1, AK027164.1, BC008723.1, |
| | | | | | AL512689.1, AK000753.1, AL121952.18, |
| | | | | | AL133062.1, AL136979.16, U91329.1, AF095901.1, |
| | | | | | BC007034.1, BC002958.1, AL080060.1, |
| | | | | | BC007389.1, AK026395.1, AL356747.18, AL590076.3, |
| | | | | | AF022813.1, BC004925.1, AC008897.7, |
| | | | | | AL137461.1, AL080110.1, BC006196.1, AL117585.1, |
| | | | | | AL136843.1, S69510.1, AF044323.1, |
| | | | | | AK026526.1, BC002574.1, AL355143.17, AL157878.11, |
| | | | | | AC020956.6, AF358829.1, AF028823.2, |
| | | | | | AF162270.1, AB060893.1, AK026518.1, AF177336.1, |
| | | | | | AK026793.1, AK026630.1, BC006287.1, |
| | | | | | AL136586.1, AF321617.1, BC006465.1, AK000647.1, |
| | | | | | AK026649.1, AC005968.1, AK000450.1, |
| | | | | | M19658.1, D83989.1, AL049464.1, AF073483.1, |
| | | | | | AF217989.1, AF217966.1. |
| HOUDE92 | 74 | 580866 | 1-1270 | 15-1284 | BE736091, BF237553, BE781264, BF686547, |
| | | | | | BE313480, BE872070, BF313936, AI138711, |
| | | | | | AI348027, BE502126, BE258631, AA524244, |
| | | | | | AW873570, AI982983, AI367855, AI052179, N90758, |
| | | | | | AA325647, AW419076, AW873111, AW008195, |
| | | | | | AI304671, AI367495, AW964887, AI609692, |
| | | | | | AA019213, AI279349, AI581275, AI224904, |
| | | | | | AI141287, H14110, H41440, AI017367, H29060, |
| | | | | | H29163, AA482386, AI471043, AI742262, |
| | | | | | AI262559, H52568, AA872715, R60248, H06091, |
| | | | | | AI041676, BE856821, H86160, H86771, |
| | | | | | AI241156, AA872384, R60761, AW131262, T31006, |
| | | | | | H56455, H95225, AA535480, AA678522, |
| | | | | | AA953998, R93546, R47352, BF968234, C04826, N39943, |
| | | | | | AA779062, T31180, H69216, AA017105, |
| | | | | | AA738315, AA019233, C04344, C05015, H17526, R99865, |
| | | | | | H84704, AW025505, AA057567, N72695, |
| | | | | | H86419, W02476, N27200, AA001522, AW194286, |
| | | | | | AI264419, AI220672, AI290418, T30927, |
| | | | | | AI620442, AA985424, R49316, H86772, AA725465, |
| | | | | | R91429, R93547, AA017106, AI074855, |
| | | | | | H95701, H69217, H95226, AW188581, AI678424, |
| | | | | | AA057566, AA326095, AA976949, H56456, |
| | | | | | W57713, AW166317, Z42112, AA775239, AI864069, |
| | | | | | AA918031, H85105, AA015626, AA977988, |
| | | | | | AA429622, R99866, H14085, AI000910, AI431360, |
| | | | | | Z38375, W57838, AA015625, R57558, |
| | | | | | AI949351, AI262422, AC005865.1, AF217967.1, |
| | | | | | AK027366.1, AC005912.1. |
| HOUFS04 | 75 | 771564 | 1-2913 | 15-2927 | AL537447, AL537448, AU120015, AU131841, |
| | | | | | AU141085, AU134821, AW612291, AU124089, |
| | | | | | AU139563, AV727622, AV727623, AU133175, |
| | | | | | BE788006, BF185243, BG257827, AU136898, |
| | | | | | BF184853, AI627486, AV705533, BF590192, |
| | | | | | BF577029, AL118692, BG257588, AU153504, |
| | | | | | BE326681, BF028316, AU154556, AL135492, |
| | | | | | BF431327, AW369693, BF216161, AI740778, |
| | | | | | AW239374, AW150161, AU150952, BE972535, |
| | | | | | AI274815, BG011960, BF210890, AV749930, |
| | | | | | AI091535, BF241838, AA888926, AL121256, |
| | | | | | BF104153, AI795954, AW513116, BF185887, |
| | | | | | AI433845, AI343701, AU158077, AI277331, |
| | | | | | AW268991, AA680329, AU155657, W28248, |
| | | | | | BF594656, BG000296, AI457635, AW661960, |
| | | | | | AI263881, W28288, AI434627, AA010836, |
| | | | | | BG012652, AW129101, AV748375, AW302270, |
| | | | | | N52145, BF219378, AL518583, AW297250, |
| | | | | | N75868, AA857253, AL120585, AW994991, |
| | | | | | AA011013, W26416, N22080, AI015118, H02915, |
| | | | | | H39966, AI039206, AA449595, AV684996, |
| | | | | | AL518582, AA953973, AI440447, AA016111, H03822, |
| | | | | | BF825307, R84685, BE702037, R84707, |
| | | | | | AA019431, BF825558, AI275797, BF826197, AA330443, |
| | | | | | R76642, R76568, BF844855, BG011970, |
| | | | | | AL120540, D79415, R85665, R84949, AW296468, |
| | | | | | AI539211, H95551, H28472, R33103, |
| | | | | | AI696200, BF210071, T54671, AA604416, R33200, |
| | | | | | AA011115, BE177754, BE177752, R85648, |
| | | | | | AA058782, BE177756, BF058858, R31662, BF825522, |
| | | | | | AA016056, BF054961, AW628524, BE218727, |
| | | | | | T54758, AW609383, AW609416, AA020805, |
| | | | | | AA419376, D62124, BE541542, AA058678, |
| | | | | | AA021571, AI610553, X85615, AA913581, BF825480, |
| | | | | | BF793324, X85616, BF970449, BF814447, |
| | | | | | BG180996, BE548914, BE536058, BF038131, |
| | | | | | BG256592, BE880182, BF032910, BF822127, |
| | | | | | BE874133, BG029053, BG257807, BG163618, |
| | | | | | AA715307, AW827276, AL036361, BG118430, |
| | | | | | BE047852, BF338723, BE876033, BE889314, |
| | | | | | BE875243, AI345543, AW673679, BE877846, |
| | | | | | AW162194, BF338002, BF968017, AW163464, |
| | | | | | BE875028, BF339322, BE877769, AI364788, |
| | | | | | BF811805, BE612681, BF339310, BG249582, |
| | | | | | BG032036, AW772685, BF032768, BG254745, |
| | | | | | BF911528, BE622183, BF814420, BE785868, |
| | | | | | BG180034, BF811793, BE910373, BE881315, |
| | | | | | AA809974, BE047859, BF680133, BF812936, |
| | | | | | BF340323, BE904178, BF885082, AW020693, |
| | | | | | AW020710, AW827289, BF344031, AL514691, |
| | | | | | BF982040, BE047952, BG120816, BF343521, |
| | | | | | AV727226, BE874997, BF970768, AW151979, |
| | | | | | BF885080, BF344733, BF812933, BG164371, |
| | | | | | BE047691, AL121286, BF856052, AL039086, |
| | | | | | BF244608, AI371228, AI623941, BG106619, |
| | | | | | AI500061, BE889355, BG122101, BF339594, |
| | | | | | BG251104, BE048179, BG113662, BE894455, |
| | | | | | BE881131, BG165879, AI371251, BF310166, |
| | | | | | AI923989, AI581033, BG036846, BF727212, |
| | | | | | AL045500, AI567971, BG169383, BE887488, |
| | | | | | AI343091, BF812937, BF751997, AB011182.1, |
| | | | | | AK002207.1, AK001949.1, AL139377.8, |
| | | | | | AL117457.1, AK025391.1, AB056421.1, AL122110.1, |
| | | | | | AK000083.1, AL122049.1, AF218031.1, |
| | | | | | AL162062.1, AB052200.1, AF111112.1, AF143723.1, |
| | | | | | AK025015.1, AL162083.1, AF217987.1, |
| | | | | | BC008719.1, AL389935.1, AL133606.1, AL512719.1, |
| | | | | | AK000618.1, AL359596.1, AK025254.1, |
| | | | | | AL162006.1, AL133557.1, AL110225.1, BC003687.1, |
| | | | | | AK026642.1, AK000212.1, AL136915.1, |
| | | | | | BC006525.1, AL110196.1, AL080124.1, AL137526.1, |
| | | | | | AL512733.1, AB060916.1, AK026927.1, |
| | | | | | AL512765.1, BC004556.1, AK024538.1, AL050277.1, |
| | | | | | AB060873.1, BC003682.1, U80742.1, |
| | | | | | AL133072.1, AK026593.1, AL050024.1, AK027142.1, |
| | | | | | AK027096.1, AL122050.1, BC008899.1, |
| | | | | | AK026959.1, AK026434.1, AL050393.1, X65873.1, |
| | | | | | AL137429.1, AL357195.1, AK025857.1, |
| | | | | | AB056420.1, BC001963.1, AB060852.1, AL137533.1, |
| | | | | | AK027116.1, AK024594.1, AK026647.1, |
| | | | | | AF260566.1, AK026592.1, AB052191.1, AK025119.1, |
| | | | | | AL136843.1, BC002342.1, AF090901.1, |
| | | | | | AL117435.1, AB055361.1, AF078844.1, BC001418.2, |
| | | | | | AK026480.1, AL133080.1, AF151109.1, |
| | | | | | AF217982.1, AK025708.1, AL133077.1, AL389939.1, |
| | | | | | AK026629.1, AL122121.1, X82434.1, |
| | | | | | AL049283.1, AL049382.1, BC005168.1, AF183393.1, |
| | | | | | AF090900.1, AL137550.1, AL442082.1, |
| | | | | | AB062978.1, AL359618.1, AL137476.1, AK027164.1, |
| | | | | | BC008488.1, AL162008.1, AK025967.1, |
| | | | | | AL137478.1, AB048954.1, AB048974.1, AL049452.1, |
| | | | | | BC005890.1, AK025798.1, AB063071.1, |
| | | | | | AL110221.1, AL136789.1, AK000391.1, AF146568.1, |
| | | | | | AF207829.1, AL133104.1, AL049996.1, |
| | | | | | AK026086.1, AB062942.1, AF218014.1, AB047623.1, |
| | | | | | AL353957.1, AK025414.1, AL512746.1, |
| | | | | | AB047801.1, AB056809.1, AL136893.1, AF125948.1, |
| | | | | | AL359620.1, BC003122.1, AL137292.1, |
| | | | | | BC006195.1, AF227198.1, BC004958.1, BC007326.1, |
| | | | | | AB060912.1, AF090934.1, AF090943.1, |
| | | | | | AL137488.1, AK026744.1, AB060908.1, AK026741.1, |
| | | | | | AB055352.1, AF218034.1, AL050146.1, |
| | | | | | AL353956.1, AL136805.1, AK026600.1, BC008365.1, |
| | | | | | AF271350.1, AL162002.1, AL117648.1, |
| | | | | | AL136884.1, AB063070.1, AK000445.1, AL049430.1, |
| | | | | | AK026045.1, AK026613.1, AB063088.1, |
| | | | | | BC006180.1, AK027146.1, AL122098.1, AL512689.1, |
| | | | | | M92439.1, AL110280.1, AB062750.1, |
| | | | | | AK026542.1, AK000718.1, AF348209.1, AL049464.1, |
| | | | | | AL049339.1, AF217966.1, AL137271.1, |
| | | | | | AL137529.1, AL096744.1, AK000323.1, AF111847.1, |
| | | | | | U91329.1, S78214.1, AF026816.2, |
| | | | | | BC008382.1, AF091084.1, AL136692.1, AK026057.1, |
| | | | | | AL133640.1, AB060879.1, AK025084.1, |
| | | | | | AK026649.1, AB060825.1, AL137574.1, BC003548.1, |
| | | | | | AL050108.1, AB047904.1, U78525.1, |
| | | | | | AY033593.1, AB048953.1, AF104032.1, AL096751.1, |
| | | | | | Y16645.1, AL080074.1, AL512684.1, |
| | | | | | AK026583.1, AL137560.1, BC001967.1, AB056427.1, |
| | | | | | AL049466.1, AF202636.1, AK025092.1, |
| | | | | | AK027213.1, AK025312.1, S77771.1, AF056191.1, |
| | | | | | AL136787.1, AK000486.1, AK000247.1, |
| | | | | | AF230496.1, AL133560.1, AL137463.1, BC000094.1, |
| | | | | | AL359583.1, AB055315.1, AK025209.1, |
| | | | | | AL137538.1, AL133075.1, AL050149.1, AL136892.1, |
| | | | | | AK000690.1, AL050092.1, AK026624.1, |
| | | | | | AK026506.1, AL137521.1, AF061573.2, AK026462.1, |
| | | | | | AK026532.1, BC004926.1, S61953.1, |
| | | | | | AK026408.1, AK000614.1, AL512750.1, AK027114.1, |
| | | | | | AK024588.1, AB060826.1, AL049938.1, |
| | | | | | AK026528.1, AL117587.1, A8050510.1, AB048919.1, |
| | | | | | AK026626.1, AL133081.1, BC004951.1, |
| | | | | | AL050172.1. |
| HOUHI25 | 76 | 888279 | 1-1235 | 15-1249 | AW274757, BF979499, BE875104, AV728303, |
| | | | | | BF671975, AV727326, AW631495, BF983857, |
| | | | | | BF248008, BF115795, BF212520, AV717938, |
| | | | | | BF571136, AV728044, AA976644, BF679046, |
| | | | | | BF477635, AI907366, BF570689, AA903720, |
| | | | | | AW972361, AA524665, BE220972, AI984786, |
| | | | | | BF979139, AI692731, BF213370, AI907373, |
| | | | | | BE439966, AI268254, AI907368, H08416, BF700421, |
| | | | | | BF541919, AV705494, AW978976, AI332994, |
| | | | | | BF540780, BF247753, AI907374, AA826200, |
| | | | | | AA701660, AI656122, AI657191, BE763093, |
| | | | | | AA936326, BF572170, BF131794, BF195177, N79377, |
| | | | | | AV715209, AI950823, BF093269, N88408, |
| | | | | | BF439990, BE159589, AA772723, N86348, AA399432, |
| | | | | | BF575806, BF984268, AW206085, AI268253, |
| | | | | | AI421859, BF680498, AI916469, BF344634, |
| | | | | | AI420669, BF670000, BC008478.1, AF126020.1, |
| | | | | | AC004839.1. |
| HPCAL26 | 77 | 762822 | 1-3083 | 15-3097 | BG164171, BG171313, AW338908, BE327883, |
| | | | | | BF058325, BE856282, AL525344, BG027433, |
| | | | | | AA621714, AL047905, AW780148, AI633775, |
| | | | | | BE973735, AW438611, AI755212, BF381979, |
| | | | | | AW337238, AI337968, AI963595, AW572336, |
| | | | | | AA432021, AW471145, AW069566, AA448477, |
| | | | | | AI936887, BF108841, AI829408, BE748629, |
| | | | | | AI042324, AI955816, AI421409, AA758227, |
| | | | | | AA814190, N91448, BF030663, AW192439, |
| | | | | | AI683517, AA417975, AI129364, AI561083, |
| | | | | | AA418135, AI088536, AW628520, BE327874, |
| | | | | | W72280, BE878275, AI348236, AI088467, N26180, |
| | | | | | AI628017, AI066421, AI346288, AI142951, |
| | | | | | AI308778, AI446338, AA458899, AI078536, AI346382, |
| | | | | | AI753070, AA923036, AI431409, AI087120, |
| | | | | | AI341640, AI567761, AI371263, AI754690, AI285250, |
| | | | | | BE619821, AA630948, AI354829, BE620033, |
| | | | | | AW294799, W45027, AI902379, AI537262, AI866883, |
| | | | | | N27411, BE876666, BF338393, AI963351, |
| | | | | | AI081820, BE395375, BE620777, BE906942, AI811301, |
| | | | | | AI627940, AL538418, AA602460, BE548617, |
| | | | | | BF038519, AW205903, BF893012, W76307, |
| | | | | | AA701166, AL525384, AW023777, AW956752, |
| | | | | | BE122762, AA128212, AI094190, BG163634, |
| | | | | | AI371264, AW856743, AW380612, R81003, |
| | | | | | BE905099, N23359, BE619502, AI589929, BE905025, |
| | | | | | AW469305, AI254707, N67744, BE619375, |
| | | | | | AA961234, BE906749, BE784570, BE909607, |
| | | | | | AW387716, BE904894, BF695306, W25857, |
| | | | | | AA134565, AW044064, AW802015, BE673511, |
| | | | | | R76732, AI392841, BF509258, BE503655, |
| | | | | | BE880509, AI299995, AA304323, AI074674, BE788330, |
| | | | | | AI086914, AA383490, AW630488, AA977524, |
| | | | | | AW802237, AA296648, AA431796, AA047280, |
| | | | | | AA813746, AW236745, AA193605, AA127172, |
| | | | | | AW080334, AI696769, BF437027, BG167009, |
| | | | | | AW361256, BE938690, R76394, BE218539, |
| | | | | | R39674, BF475923, BE843065, AW819110, AW819102, |
| | | | | | R39598, R80801, AI540488, AA134564, |
| | | | | | AA193568, AW818988, AI245052, N55215, BG120706, |
| | | | | | AA307251, BG119547, BE843137, BE816369, |
| | | | | | AW957969, AA776346, AW819052, C01782, |
| | | | | | AW517411, AI906011, AA303350, T24798, |
| | | | | | BF799939, AW603344, BE748082, W39532, BE543246, |
| | | | | | AA047141, BF800032, N34692, BE168974, |
| | | | | | AA340956, BE620236, BE937574, BE122763, |
| | | | | | AW818992, AA304405, AF193611.1, BC001278.1, |
| | | | | | AF015287.1, AL136914.1. |
| HPEBA84 | 78 | 753957 | 1-1146 | 15-1160 | AV702197, AW964983, AI283912, AV688589, |
| | | | | | AA679863, R77836, AA112690, AI686145, |
| | | | | | AA342049, AA658167, AA112689, AA640275, |
| | | | | | AA342050, BF876992, AL161799.19. |
| HSAVA08 | 79 | 580870 | 1-1047 | 15-1061 | AA523633, BE562634, AI828787, AC008738.6, |
| | | | | | AC005722.1, AC020908.6, AC090942.1, |
| | | | | | AL035685.21, AL049843.18, AC027124.4, AC005089.2, |
| | | | | | AC084865.2, AC002465.1, AC034251.5, |
| | | | | | AC022211.5, AL050335.32, AC009123.6, AC005320.1, |
| | | | | | AC002365.1, U91323.1, AJ251973.1, |
| | | | | | Z95115.1, AL359792.3, AL133545.10, AC011444.5, |
| | | | | | Z95152.1, AC002378.1, AL139352.16, |
| | | | | | AL122035.6, AC006160.9, AL109825.23, AC005015.2, |
| | | | | | AL162430.15, AL033526.24, AP000697.1, |
| | | | | | AC005328.1, AC007907.2, AL353653.19, AC010463.6, |
| | | | | | AC007637.9, AL161779.32, AC008755.6, |
| | | | | | AC018644.6, AC002996.1, AP001712.1, AC005756.1, |
| | | | | | AC010363.6, AC005225.2, AC002544.1, |
| | | | | | AC002470.17, AC003684.1, AC011480.3, AC007277.2, |
| | | | | | AC010878.4, AC011491.5, AL022394.3, |
| | | | | | AC068799.14, AL137918.4, AP001726.1, AC006130.1, |
| | | | | | AL138827.16, AC073864.28, AL034420.16. |
| HSHAX04 | 80 | 812178 | 1-1273 | 15-1287 | AL518245, AL513560, AL518244, AL527318, |
| | | | | | BE796445, BE729339, BE794797, BE729215, |
| | | | | | BF570366, BF969527, BE513213, BE797077, |
| | | | | | BE409736, AV715789, BE729781, BG165883, |
| | | | | | BF569872, BE730249, BF025786, BF971834, |
| | | | | | BE747502, BF974060, BF127469, BE394313, |
| | | | | | AI192460, BE277674, BE387113, BE408890, |
| | | | | | BF243019, BF685280, BE252479, BE274070, |
| | | | | | BE386787, BF686552, BE408335, BG179144, |
| | | | | | BG253243, AI193657, BE383115, BF109402, |
| | | | | | BE727996, AI978927, BE747511, BE313903, |
| | | | | | BF027209, BE394458, BG167026, BE387005, |
| | | | | | BE257613, BE395496, BF127655, AI819133, |
| | | | | | BE408659, AV701134, BF975755, BE297737, |
| | | | | | BE276425, BE257900, AW467999, BE409043, |
| | | | | | BF129135, BE621412, BE251025, BF132821, |
| | | | | | AV701355, BE736137, BF684777, AA151920, |
| | | | | | BF205110, AA476567, BE393897, AI589910, |
| | | | | | BE393107, BE266145, BE390224, BF132684, |
| | | | | | AA746035, AW406080, BF438288, BE745519, |
| | | | | | BF238211, BE258291, BE385352, AA224497, |
| | | | | | BE789268, BF237992, AV701339, AA476450, |
| | | | | | BE389845, AA922493, AA058904, AV712372, |
| | | | | | AA809660, AI972258, BE390228, AA031495, |
| | | | | | AI128546, AA033810, AA934757, AA031586, |
| | | | | | AI167713, BG111292, BE266333, AV736079, |
| | | | | | BE294483, BF132501, AI086942, AL513559, |
| | | | | | AI749671, AA904234, BE410720, AW069373, |
| | | | | | AA535057, BF835180, BF000188, AA224434, |
| | | | | | BF591243, AA037753, BF856066, AI189102, |
| | | | | | AA338222, AI284100, AI198266, BF239384, |
| | | | | | BF834463, H45086, AI079772, AI620932, W87609, |
| | | | | | C75448, AI498905, BE621931, AW272369, |
| | | | | | C75433, H45164, T68206, C75434, AA039244, |
| | | | | | AW473012, C75456, AA043857, AA627969, |
| | | | | | AA961372, AW192043, BF759521, AA643805, |
| | | | | | BE048627, AA916520, AU117291, AA327300, |
| | | | | | BF836781, AI247228, BF836803, AA480241, |
| | | | | | AA768298, AI187734, BC004898.1, BC008451.1, |
| | | | | | AF104012.1, AF042385.1, AF042386.1, |
| | | | | | AF104013.1, AL049824.4, AL033526.24, T57534, |
| | | | | | H45163, N79482, W87900. |
| HSKDR27 | 81 | 580874 | 1-748 | 15-762 | AI984221, AI740960, AW015044, BF591015, |
| | | | | | W80440, AI141908, AA627626, AA969950, |
| | | | | | AI581286, AW613262, AW170703, AW073992, |
| | | | | | BF338322, AA480836, R52038, BF436470, |
| | | | | | AW074677, AA994760, BE219883, AI381244, |
| | | | | | BE677262, R52037, BE327304, R49984, AW304136, |
| | | | | | BE042923, R47846, AA359428, AI538725, |
| | | | | | AW836013, C00374, BE550516, AA887620, AW873686, |
| | | | | | BG107838, BE048302, H50794, AI961625, |
| | | | | | W79036, AF177941.1. |
| HSQBF66 | 82 | 560726 | 1-1010 | 15-1024 | AL043876, D44625, BE674949, AA573644, |
| | | | | | AV652267, AA579352, AA745570, AA579353, |
| | | | | | AI732225, AA085683, AL356791.9, AL031985.10, |
| | | | | | AC006452.4, AC022007.3, Z68885.1, |
| | | | | | AL096838.1, AL513131.1, AL121890.34, AC026172.3, |
| | | | | | AL135911.16, AL122035.6, AP001208.3, |
| | | | | | AP000907.5, S83170.1, AC024163.2, AC025438.5, |
| | | | | | AC091118.2, AC002299.1, AL049795.20, |
| | | | | | AL161449.7, AC004458.1, AC000118.1, AL031662.26, |
| | | | | | AP001537.1, AC010530.7, AL163218.2, |
| | | | | | AC007676.19, AC005098.2, AF235097.1, AL035690.10. |
| HSRFD18 | 83 | 840771 | 1-1875 | 15-1889 | AL037444, BE889424, BF439488, BF446681, |
| | | | | | AW297772, BE644962, AW295194, BF740081, |
| | | | | | BF813145, BE466328, AA716418, BE675824, |
| | | | | | BF196138, AI280149, AA814882, AA813632, |
| | | | | | BE221432, BE677733, AA358821, BF246362, |
| | | | | | BF700198, AW452195, AU144490, BE220601, |
| | | | | | AA761963, AA658222, AA327922, AI123037, |
| | | | | | AI473112, AW390382, BF992291, BE928864, |
| | | | | | R99503, AA055144, AU119961, AA182647, |
| | | | | | AW390381, AU130604, AA182483, AW390436, |
| | | | | | BF693283, AA054934, BF849246, R98214, |
| | | | | | AU117739, BF993158, BF002983, AA248903, |
| | | | | | AA179387, AA182760, AA934941, AI474620, |
| | | | | | BF670121, BF858341, BE928859, BE150427, |
| | | | | | AI912621, AA938230, BF919684, AF288393.1, |
| | | | | | AL096819.17, AK023095.1, AK000945.1, |
| | | | | | AL117441.1. |
| HSWBE76 | 84 | 751308 | 1-860 | 15-874 | BE620901, BG170181, BE620502, BE905496, |
| | | | | | AA195064, AI674742, AU150515, BE222944, |
| | | | | | BE965160, AW071814, AU147333, AW081850, |
| | | | | | AU148556, AI433777, AA708102, AI625507, |
| | | | | | AU150042, AI333540, AI022464, AW024603, |
| | | | | | AI423210, AA195011, AA708100, AU160595, |
| | | | | | BF939994, AI365587, AI268519, AI540265, |
| | | | | | AI285640, AA252209, AA581561, AA913601, |
| | | | | | AA603763, AA009729, AA009444, AA252208, |
| | | | | | AA886783, AA724048, AW391826, AI079718, |
| | | | | | AA775594, R48504, R48503, AA427500, |
| | | | | | AW881973, BE005990, AA405752, AA430679, BE005985, |
| | | | | | AW265644, AI424413, AW275442, BF764539, |
| | | | | | BG251413, AI890866, BF899981, AV726282, |
| | | | | | AI207963, AI216407, AI797190, AA862943, |
| | | | | | AA398675, AA393321, AA599014, AI097301, |
| | | | | | AI279255, AV752744, BE349244, AU150691, |
| | | | | | AW068586, AW628679, AI003284, AW780020, |
| | | | | | BF994241, R12340, H09530, AI612829, |
| | | | | | AV649791, AW887050, W45434, AK001237.1, |
| | | | | | AC079175.24, AL392044.7, AC002539.1, AC002538.1, |
| | | | | | AC090526.3, AF235098.1, AF129077.2, |
| | | | | | AC006117.1, AL357503.12, AC004882.2, AC006379.2, |
| | | | | | AL096770.16, AC005010.2, AL355977.11, |
| | | | | | AC061709.25, AL034451.26, AL133467.4, AL033529.25, |
| | | | | | AL031386.1, AC002086.1, AF165147.1, |
| | | | | | AP001727.1, AL139389.16, AL163151.1, AC053466.5, |
| | | | | | AC005529.7, AF165175.2, AC073068.8, |
| | | | | | AL583784.3, AL357150.7, AL163247.2, AC016254.14, |
| | | | | | AC013471.7, AL161935.10, AC009753.5, |
| | | | | | AC005023.1, AC004456.1, AC009949.9, AL049713.20, |
| | | | | | AC003986.1, AP001671.1, AL096776.12, |
| | | | | | AC020908.6, AC018468.4. |
| HT3BF49 | 85 | 838620 | 1-2160 | 15-2174 | AW450103, AI286250, H15073, H15072, |
| | | | | | AI283763, AW451893, AL355304.12. |
| HTEEW69 | 86 | 764835 | 1-1268 | 15-1282 | BE253978, BE254398, BE781341, BE255799, |
| | | | | | BE780436, BE780457, BE255033, BE251940, |
| | | | | | BE257706, BE780314, BE783528, BE255909, |
| | | | | | AA887084, AW172618, BE253356, BE257391, |
| | | | | | BE257100, AA913157, BE252558, BE256521, |
| | | | | | BE618088, BE258350, BE253421, BE251745, |
| | | | | | BE252959, AI184620, AI024872, AI581295, |
| | | | | | AI024850, BE256106, BE778121, AA062589, |
| | | | | | BE255962, AA938866, BE251245, BE259105, |
| | | | | | AA953444, BE258660, T19332, AI351056, |
| | | | | | AA700997, BE251072, BE259435, AA063062, |
| | | | | | AI016246, AA406443, AA994466, T36111, |
| | | | | | AI017555, AW025700, AA364302, BE259217, |
| | | | | | AA729497, BE255046, AW966401, U25928, |
| | | | | | BE251141, AA410460, AA776786, AV702417, |
| | | | | | AV695700, AV729376, AW950211, AV703687, |
| | | | | | AV706417, AV709092, AV686100, AV696754, |
| | | | | | AW952007, AW956891, AW964251, AW960655, |
| | | | | | AV728652, AV705299, AV705340, AV702296, |
| | | | | | AV726787, AW951270, AV729076, AV702998, |
| | | | | | AW962386, AW949478, AV725153, AV651897, |
| | | | | | AW962978, AW950443, AV703790, AW960601, |
| | | | | | AW952403, AW952183, AW959806, AV656903, |
| | | | | | AV661704, AW952751, AV697196, AW956075, |
| | | | | | AV645936, AV709587, AW955723, AV705135, |
| | | | | | AV658084, AW959980, AV650283, AV692600, |
| | | | | | AV650315, AW963768, AV659389, AV650591, |
| | | | | | AV697880, AV727613, AV656373, AV726010, |
| | | | | | AW964440, AV655280, AV660258, AV708109, |
| | | | | | AW959521, AV647789, AW956474, AV659294, |
| | | | | | AV727787, AV650691, AV703146, AV686060, |
| | | | | | AV725745, AV686064, AW951239, AV660608, |
| | | | | | AV728148, AV659322, AV726156, AV650768, |
| | | | | | AV654908, AV726590, AV698545, AV656478, |
| | | | | | AW959988, AV709314, AV653353, AV708381, |
| | | | | | AV654070, AV660728, AW951437, AV691080, |
| | | | | | AW951281, AV702385, AV658275, AW949802, |
| | | | | | AV652001, AV651955, AW955662, AV707979, |
| | | | | | AV703669, AV709580, AV727003, AV725208, |
| | | | | | AV685536, AV725582, AV708786, AW957517, |
| | | | | | AV659547, AW959543, AV727526, AV703169, |
| | | | | | AV725618, AV651920, AW954439, AV727510, |
| | | | | | AV725633, AV725031, AV728518, AV702266, |
| | | | | | AV725577, AV725033, AV706223, AV728924, |
| | | | | | AV725617, AW954206, AW960207, AW955900, |
| | | | | | AV707863, AV725991, AV696931, AW964421, |
| | | | | | AW952410, AV703062, AV727822, AV699089, |
| | | | | | AW964410, AV701874, AW950888, AV703501, |
| | | | | | AW962444, AW964409, AW964585, AW953574, |
| | | | | | AV702772, AV704774, AW952460, AW955710, |
| | | | | | AW954237, AV701180, AV651519, AV707401, |
| | | | | | AV701183, AV658751, AV683669, AV709660, |
| | | | | | AV704585, AV709935, AV654035, AV707652, |
| | | | | | AV707663, AV707654, AV728721, AV683994, |
| | | | | | AV706854, AV704042, AV654282, AV709880, |
| | | | | | AV697288, AV729220, AW954134, AV698290, |
| | | | | | AV687035, AV704847, AV694836, AV706882, |
| | | | | | AV697498, AV702954, AV655096, AV686420, |
| | | | | | AV694812, AV727238, AV682997, AV727126, |
| | | | | | AV696866, AV707656, AV726681, AV655890, |
| | | | | | AV701946, AV728997, AV706162, AV686390, |
| | | | | | BC001796.1, AK027894.1, AC023790.21, |
| | | | | | AF217994.1, Y08991.1. |
| HTEHU59 | 87 | 840385 | 1-1509 | 15-1523 | BG249175, AL046260, AW963943, AI828967, |
| | | | | | AW955696, AI760208, AW297718, AI032354, |
| | | | | | AA417102, AL121147, AA806454, BF216179, |
| | | | | | AW514160, AA417206, W73366, N39447, N75616, |
| | | | | | N22370, W73427, N65972, AI370121, |
| | | | | | AI440453, C16433, AW470432, N98313, AW204089, |
| | | | | | AA444140, AL046261, H06227, AI796882, |
| | | | | | AA443958, AA789252, AI221678, AA716720, |
| | | | | | AW439530, AW873326, AI143241, N35303, |
| | | | | | AW613664, AA887889, AA845989, AW665345, |
| | | | | | BE218168, AI333474, AI333483, AI361785, |
| | | | | | BE464766, BE326250, AI680844, AA936826, |
| | | | | | BE348681, N94234, T90568, AI693650, |
| | | | | | AI971432, AI864735, R32990, AA379582, R40841, |
| | | | | | AA037360, R79419, AA364460, AW502585, |
| | | | | | T26572, BF248365, R79420, AA765052, BE763303, |
| | | | | | AV710415, AW137034, BF916703, N48559, |
| | | | | | BE504072, AW500077, AA663027, H38490, |
| | | | | | BE545425, AA953152, AI963960, BE907434, |
| | | | | | AL049814.6, AL137010.4. |
| HTEMQ17 | 88 | 840387 | 1-1754 | 15-1768 | BG255431, AW365828, BF031371, AW365643, |
| | | | | | BF107518, BF211270, AL530660, AL120983, |
| | | | | | AW365846, BE141392, AI276663, BG121604, |
| | | | | | BF857983, AW365821, AW197389, BE141378, |
| | | | | | AW504995, BE141375, AV713095, BF811334, |
| | | | | | BE885456, AI683415, AA758267, AA332445, |
| | | | | | BF095659, BE152545, AA298292, BF695980, |
| | | | | | BE152546, AA319133, BE152543, AL040847, |
| | | | | | AA337156, AK027539.1, Z69890.1, AE006462.1. |
| HTGBK95 | 89 | 834490 | 1-1117 | 15-1131 | AL522125, AL522126, AL519350, AL529333, |
| | | | | | BF978108, BE217821, AW299468, BG106602, |
| | | | | | BE326803, AU149173, BE646271, AU153293, |
| | | | | | AU154281, AI432448, AI039818, BE467032, |
| | | | | | BE042910, AU152129, AU160794, AU153911, |
| | | | | | AI571337, AA237091, AI963695, AI635374, |
| | | | | | AA932292, AW043706, AI302679, AA236679, |
| | | | | | AA767544, AI735388, N42646, AI590210, |
| | | | | | AI224546, AI632813, AA234900, BF338277, |
| | | | | | AI085872, AW002721, AI049665, AU149933, |
| | | | | | AI142800, AI269171, AW242940, AI741857, |
| | | | | | BF034584, AI653576, R94321, N68116, AA513076, |
| | | | | | R43971, R94225, H05324, H24266, |
| | | | | | BG111524, R97540, Z41226, AA235171, N67392, AA991730, |
| | | | | | BF925392, AI521589, BF966823, BG110768, |
| | | | | | AW410784, BE205895, AI914747, AV699173, |
| | | | | | AV752994, BF037819, AL046227, AP001728.1, |
| | | | | | AP000010.2, AP001432.1, AP000151.1, D87343.1, |
| | | | | | AC007383.4, AP000344.1, AC007172.6, AL021155.1, |
| | | | | | AC011481.4, AC006994.4, AL591104.2, |
| | | | | | AC011491.5, AC002565.1, AC002073.1, AP000030.1, |
| | | | | | AL512347.14, AC018639.8, AC010092.4, |
| | | | | | AL391241.21, AC004638.1, AL136168.4, AC084865.2, |
| | | | | | AP001746.1, BC008280.1, AL354760.11, |
| | | | | | AL132768.15, AL035458.35, AL365338.17, AP001711.1, |
| | | | | | AK025798.1, AC009779.18, AC015982.9, |
| | | | | | AL031726.22, AL049539.21, AC004797.1, AC034240.4, |
| | | | | | AP000208.1, AP000130.1, AL031733.3, |
| | | | | | AP000247.1, AC083871.2, AC083884.6, AF042090.1, |
| | | | | | AC018719.4, AC006334.3, AC011811.42, |
| | | | | | AC007563.2, AC004878.2, AC004227.1, AC020552.4, |
| | | | | | AP000045.1, AP000113.1, AL118520.26, |
| | | | | | AC008551.5, AC018758.2, AL163282.2, AL353716.18, |
| | | | | | AL157372.18, AL590037.7, AP001710.1, |
| | | | | | Z82214.23, AC008507.8, AC023880.5, AC020928.6, |
| | | | | | AC008755.6, AL356747.18, AL445645.10, |
| | | | | | AL031727.42, AC005562.1, AC002425.1, AL079342.17, |
| | | | | | AL136126.34, AC004883.2, AL034374.2, |
| | | | | | AC019184.3, AC009501.3, AC002558.1, AC006435.7, |
| | | | | | AC004383.1, AL031985.10, AC073316.6, |
| | | | | | BC007199.1, AF307337.1, AL133444.4, AC011484.4, |
| | | | | | AP000313.1, AC007551.1, AC011450.4, |
| | | | | | AC006023.2, AL158158.14, AL121897.32, AF334404.1, |
| | | | | | AC006006.2, AC007003.4, AL050307.13, |
| | | | | | AC009484.3, AL391122.9, AC007597.3, AC005086.2, |
| | | | | | AC022425.6, AC006039.2, AP001695.1, |
| | | | | | AC073964.3, AC006345.4, AC009220.10, AC004166.12, |
| | | | | | AP000050.1, AJ400877.1, AC005399.19, |
| | | | | | AL137060.13, AC004750.1, AC025754.4, AC003043.1, |
| | | | | | AC004882.2, AC024028.10, AL022165.1, |
| | | | | | AL121722.9, AC005212.1, AC005736.1, AL022311.5, |
| | | | | | AL035423.4, AC079602.15, AC010650.8, |
| | | | | | AC004098.1, AC006487.8, AC012306.11, AP000117.1. |
| HTLEM16 | 90 | 779133 | 1-1901 | 15-1915 | AL537268, AL524867, AL521379, AL524655, |
| | | | | | AL521380, AL520082, AL528768, AL513950, |
| | | | | | AL527410, AL532992, AL518562, AL526411, |
| | | | | | AL520081, AL524866, AL527368, AL518561, |
| | | | | | BF793507, BE293505, BE797874, BF966727, |
| | | | | | BF793437, BE293461, BF688814, BF690146, |
| | | | | | BF966760, BF340717, BF663834, AL524654, |
| | | | | | AA781166, BF342274, BG179677, BF570071, |
| | | | | | BF663178, AL537267, BF690560, BE903323, |
| | | | | | AV728729, BF340891, BF528974, BE257966, |
| | | | | | BE278858, BF515895, AW964631, BE297161, |
| | | | | | BF968582, BF026117, BE733780, BE280977, |
| | | | | | BF724855, BE312997, AA641020, BF529180, |
| | | | | | AL519567, BE279987, BF344151, BE255018, |
| | | | | | BE390139, BF701583, BF688333, BF966530, |
| | | | | | BF345769, BE302964, BF345255, BF569584, |
| | | | | | BF206038, BE249931, BF026959, BF966315, |
| | | | | | BE257931, BE730892, BF061136, AA621730, |
| | | | | | BF058285, BE900610, AL526371, BF347440, |
| | | | | | BE302621, AW131766, BF529014, BF984577, |
| | | | | | AI803361, BF439974, BF527493, BF967158, |
| | | | | | AI708896, BE900258, AW131694, W21824, |
| | | | | | BE408464, BE563677, BE251526, BG024544, |
| | | | | | BE780162, BE257745, BE892373, BE727832, |
| | | | | | BE727561, AW026308, BG035433, AL513949, |
| | | | | | BE731124, BE896130, BE276768, BE385541, |
| | | | | | BF240238, BF984799, BF689920, BE390488, |
| | | | | | BE778942, BF084737, BF965298, BE905202, |
| | | | | | AA640946, BE383842, BF724132, BG024277, |
| | | | | | AI279215, BF529777, BE314506, AW167695, |
| | | | | | BE407700, AW027751, BE904285, BE384005, |
| | | | | | BF027626, BG031193, BG106859, BF725279, |
| | | | | | AA044161, BG025646, BG119068, BF346642, |
| | | | | | BF027086, AL134384, AI299018, BE281345, |
| | | | | | AA908781, AA496423, H38040, AI095564, |
| | | | | | BE906042, BF026948, BE408496, BF528680, AI338106, |
| | | | | | W22099, BF111929, BF689664, AA086051, |
| | | | | | AI138962, AI815598, BE895892, AA921766, |
| | | | | | AA809477, BF851430, N95209, AA402419, |
| | | | | | BE302043, BF026902, AA284506, BF446741, |
| | | | | | BE547438, BG056414, AA761749, AW152609, |
| | | | | | AA679123, AA526535, N78612, AA809563, |
| | | | | | W27812, AA903910, D52750, H41405, |
| | | | | | C15929, BG104603, N70493, H15374, H15378, AI033087, |
| | | | | | BE764253, BF670047, AV648334, AI871263, |
| | | | | | T33274, R44660, AW513845, AA044069, BG059536, |
| | | | | | BE350072, AW166762, BE207476, AW262785, |
| | | | | | AA961219, AW190491, T30636, AW195111, |
| | | | | | AV723609, BE731711, W04862, BF203872, |
| | | | | | BE207570, H73593, AA527956, H41532, AI813904, |
| | | | | | BF340463, BF984596, BE249854, AW873291, |
| | | | | | AA976134, BE870399, R59073, AI301136, R59953, |
| | | | | | BF724545, BF434606, AI341591, BF795344, |
| | | | | | Z43745, AW006965, AI539828, AI620455, R71196, |
| | | | | | AA262408, H38431, AA746078, BE300768, |
| | | | | | AA768657, AA287226, H39122, AI688746, R59074, |
| | | | | | AW968070, AI221081, H45573, BG036289, |
| | | | | | BF732285, R89743, R52105, R89524, AW192972, |
| | | | | | H39109, F21878, R55125, AA054051, |
| | | | | | F35396, H73136, R89515, H27036, H30800, BC007452.1, |
| | | | | | AL049981.1, U79458.1, T71990, T72134, |
| | | | | | R13336, R13361, R14291, R19855, R20564, R23528, |
| | | | | | R23850, R38051, R38140, R40239, |
| | | | | | R40806, R40877, R46066, R52202, R40239, R46066, R40806, |
| | | | | | R40877, R55172, R59952, R71197, |
| | | | | | R74550, H00920, H00921, H06038, H13371, H14229, H14228, |
| | | | | | H15379, H15734, H15735, H20187, |
| | | | | | H20378, H22730, H24012, H25024, H25025, H27124, H41316, |
| | | | | | H39140, H45048, H45083, H46906, |
| | | | | | H46907, R84647, R85533, R86285, R86864, R87472, R87473, |
| | | | | | R88512, R89742, R89818, H50796, |
| | | | | | H51181, H51561, H51928, H52028, H54799, H54852, H73819, |
| | | | | | H74228, H80914, H80915, N51908, |
| | | | | | N64691, N70497, N91704, W25242, AA086140, AA115567, |
| | | | | | AA115088. |
| HTNBK13 | 91 | 831967 | 1-1146 | 15-1160 | BE799670, BE794458, BF969839, BF116235, |
| | | | | | BE894258, AI755110, BE693669, AA209372, |
| | | | | | AA209368, AV702645, AW957276, AV724122, |
| | | | | | AW517214, AW173346, AA197278, AI609300, |
| | | | | | BF726226, AI261762, BE882052, AI400083, |
| | | | | | AA112077, AI242204, AA114827, AA314213, |
| | | | | | AI741473, AI828740, AI982748, AA197243, |
| | | | | | AI140451, BF923463, AA838629, AA854805, |
| | | | | | AA114846, N59363, AA931373, AA972617, |
| | | | | | BF358017, AI687104, AA234016, AA843577, |
| | | | | | AA625125, AA133768, AA911212, AI553981, |
| | | | | | AA304885, AA133767, R76792, AI559186, |
| | | | | | AW874604, BF358016, BE180724, AA486696, |
| | | | | | BG248840, AA733214, R75956, H24319, AA447346, |
| | | | | | AW839247, AA633116, AI187039, AA877750, |
| | | | | | AA938362, AA083910, AA384854, N32060, H23039, |
| | | | | | AA678500, F16874, AA972329, T84723, |
| | | | | | AW372424, AW372436, AA906710, AW372421, |
| | | | | | AW372425, AW372444, AW372435, AW372434, |
| | | | | | AW372427, AW372439, BF897466, AW372423, |
| | | | | | AW062891, AW372443, AW372420, AW372440, |
| | | | | | AW372433, AW372437, AW372422, AW372432, |
| | | | | | AW372442, AW372430, AW372428, AW372419, |
| | | | | | AW372429, AI383049, AI383050, AW372431, |
| | | | | | AI702272, AI701769, AW372274, AW372408, |
| | | | | | AA092723, AA634344, AW805484, AI623944, |
| | | | | | AI985597, AW073164, AW372407, AA352209, |
| | | | | | AW749114, AW629894, AA912615, AA825365, |
| | | | | | AA029876, H55702, BE814640, AA975153, |
| | | | | | T52666, AI540674, AW073898, AA857847, AA808175, |
| | | | | | AV721824, AI298026, AW834282, AW952443, |
| | | | | | AI287233, AI784233, BE966278, AA809897, |
| | | | | | AL514721, AI698391, AI500714, BE905211, |
| | | | | | AI978703, BE874163, AA868961, AW051088, |
| | | | | | AL514025, AI570884, AI250627, AW827249, |
| | | | | | AI366900, AV713528, AI633125, AI538564, |
| | | | | | AI915291, AW152182, BE393784, BE843239, |
| | | | | | AI582932, AI590043, BF970040, BF811804, |
| | | | | | AI889189, AL514511, BF724894, AA641818, |
| | | | | | AI866469, BE965208, AI884318, AI638644, |
| | | | | | AI570056, W74529, AI804983, AL513779, |
| | | | | | BF814449, AI699823, AI345745, AL514871, AV733582, |
| | | | | | AI351959, BE896769, AI628337, AL513999, |
| | | | | | BG026483, AI610714, AW189332, AV726590, |
| | | | | | BF811802, AI538885, AI274507, AI423198, |
| | | | | | AV753074, AL043070, AI521005, AI621341, |
| | | | | | BG029667, AI571966, AI539690, AI500061, |
| | | | | | AI702527, AI741158, AW020693, BG105241, |
| | | | | | AI927233, AI979129, AL514279, BF970768, |
| | | | | | AI670002, BE881211, BE964961, BE963575, |
| | | | | | BE967219, AA928539, AV712722, BF089679, |
| | | | | | AI559524, BE964506, AI583558, AI499570, |
| | | | | | AW020095, BE784335, AL514455, AI811603, |
| | | | | | BF750875, AI473536, AL513911, AI922215, |
| | | | | | AL041150, N33175, AL515033, R41605, |
| | | | | | AW072349, BF812426, R32821, AV726058, AL513631, |
| | | | | | AL514357, AL513907, AI815232, BG031068, |
| | | | | | AL121365, AI859991, BF885082, BE880084, |
| | | | | | AI872423, AL050345.1, AL021707.2, AL136686.1, |
| | | | | | AB015347.1, BC008839.1, BC008899.1, |
| | | | | | AK026959.1, Y10936.1, AK026647.1, AB060893.1, |
| | | | | | AK027137.1, AL512765.1, AL133637.1, |
| | | | | | AL389935.1, AL136808.1, AB050431.1, AL110269.1, |
| | | | | | AL049283.1, AF143723.1, BC002733.1, |
| | | | | | AF141289.1, AL122100.1, BC001056.1, AL133010.1, |
| | | | | | AB060877.1, BC002343.1, BC006494.1, |
| | | | | | AK000250.1, AF184965.1, S78453.1, AB060863.1, |
| | | | | | BC004925.1, AB047947.1, M85164.1, |
| | | | | | AK026462.1, BC009311.1, AL049938.1, BC001967.1, |
| | | | | | AL122045.1, AL080156.1, AL080148.1, |
| | | | | | AL137480.1, S76508.1, AK024538.1, AF097996.1, |
| | | | | | BC004899.1, AK026045.1, AK026613.1, |
| | | | | | AL137284.1, AF155827.1, AL117648.1, BC008063.1, |
| | | | | | BC005858.1, BC004195.1, BC002372.1, |
| | | | | | AF058921.1, AF199509.1, AL110218.1, AK000502.1, |
| | | | | | BC007920.1, BC005825.1, AK024992.1, |
| | | | | | AL137530.1, AL080110.1, S77771.1, AK024747.1, |
| | | | | | BC001199.1, BC002697.1, AC020910.5, |
| | | | | | BC004945.1, X00474.1, AK026744.1, AL110228.1, |
| | | | | | AL117394.1, AB047904.1, Z82022.1, |
| | | | | | BC008285.1, AL136747.1, AK025708.1, AL110225.1, |
| | | | | | BC004556.1, AL133623.1, AK025889.1, |
| | | | | | AL137627.1, AJ406939.1, AL049382.1, BC002409.1, |
| | | | | | AL050280.1, AF090903.1, AL137533.1, |
| | | | | | BC006287.1, AF227198.1, D83032.1, AF177340.1, |
| | | | | | BC008920.1, AL136850.1, AK024594.1, |
| | | | | | BC004530.1, AF069506.1, AF232009.1, BC007926.1, |
| | | | | | BC004513.1, Y14314.1, AL157482.1, |
| | | | | | AL133049.1, AL110280.1, AL133665.1, BC006414.1, |
| | | | | | AB049849.1, BC004991.1, AL110196.1, |
| | | | | | AL133080.1, AB050410.1, AB047623.1, AK027173.1, |
| | | | | | AL137574.1, AL137711.1, AB055368.1, |
| | | | | | AK025312.1, AF274348.1, BC002473.1, AF274347.1, |
| | | | | | AL133112.1, AK026408.1, BC003658.1, |
| | | | | | X82434.1, BC009221.1, AF245044.1, BC000253.1, |
| | | | | | AL080159.1, BC002809.1, BC003614.1, |
| | | | | | BC004222.1, AK025375.1, AL137523.1, BC005168.1, |
| | | | | | AK026741.1, BC008037.1, AB056809.1, |
| | | | | | BC003684.1, AL359941.1, AK026550.1, AK024588.1, |
| | | | | | AL049339.1, AB055361.1, BC008836.1, |
| | | | | | AL137560.1, AF217987.1, AL080139.1, AL137529.1, |
| | | | | | AL389982.1, AK000653.1, BC007499.1, |
| | | | | | AL137276.1, AF076464.1, AB060912.1, AB048953.1, |
| | | | | | AB060876.1, AK000103.1, AL390184.1, |
| | | | | | AB062938.1, AK025435.1, BC005165.1, AK000257.1, |
| | | | | | AL136893.1, AB052200.1, AF262032.1, |
| | | | | | AL136754.1, AL137488.1, AL080126.1, BC004191.1, |
| | | | | | AL050092.1, AF230402.1, AF098162.1, |
| | | | | | AL137550.1, AK000690.1, BC005002.1, AK026534.1, |
| | | | | | AL162083.1, BC008781.1, AK026547.1, |
| | | | | | BC005805.1, AK026480.1, BC008686.1, AK025339.1, |
| | | | | | BC003101.1, BC007347.1, AL133075.1, |
| | | | | | BC002466.1, AK026927.1, AK025857.1, AL136842.1, |
| | | | | | AL137716.1, AF285167.1, AL162006.1, |
| | | | | | AL136615.1, BC008918.1, BC006164.1, BC006410.1, |
| | | | | | AK000630.1, AF183393.1, BC007556.1, |
| | | | | | AK025254.1, AK027142.1, BC004416.1, AY026527.1, |
| | | | | | AL133113.1, AL162004.1, AB055315.1, |
| | | | | | AL356859.12, AL080162.1, AL137526.1, AK000603.1, |
| | | | | | BC004370.1, BC009310.1, BC006103.1, |
| | | | | | BC003056.1, BC001652.1, AL117416.1, AL137459.1, |
| | | | | | BC003569.1, AK000083.1, BC000090.1, |
| | | | | | AF132730.1, D83989.1, AK027152.1, AK000323.1, |
| | | | | | AL353956.1, BC001844.1, BC004264.1, |
| | | | | | BC001969.1. |
| HTODN35 | 92 | 570901 | 1-1580 | 15-1594 | AC009079.4. |
| HTPDU17 | 93 | 840596 | 1-2064 | 15-2078 | BE869540, AL138453, AI889499, BE676567, |
| | | | | | AI683595, AU148542, AI039004, BF512788, |
| | | | | | AI870272, AI475918, W84558, AI306697, |
| | | | | | AI348214, AU124745, AI039634, AW339552, AA993287, |
| | | | | | AI378108, AI660166, AI632811, AI022311, |
| | | | | | AA421143, AI969630, H13875, AU156227, AA448780, |
| | | | | | AV656957, AA620816, AI351952, AI077578, |
| | | | | | AA397629, H69276, AI140584, AI093561, AA369632, |
| | | | | | BF768781, BF768924, Z46102, BE825411, |
| | | | | | AA905570, AA252965, R06813, R69887, AI610669, |
| | | | | | BF836773, AA383097, AA953665, AV724009, |
| | | | | | AI368500, AW300903, AW577896, BE393193, |
| | | | | | R33167, F04291, BF348790, AW935770, |
| | | | | | AA301251, H13832, AA227255, AW843678, AA234999, |
| | | | | | AW935729, AA449799, BF834447, AW139651, |
| | | | | | AW134619, BC008784.1, AK001266.1. |
| HTTDN24 | 94 | 766485 | 1-1978 | 15-1992 | AL513751, BG035744, BE792734, BE535814, |
| | | | | | AI968100, AI638191, AI962526, AW590203, |
| | | | | | AW593447, AW590212, BE541446, BE220296, |
| | | | | | AA205663, BE564856, BF769037, AI968771, |
| | | | | | AI632511, AW250856, AA205775, AA205709, |
| | | | | | BF843264, AA773929, N53214, AA486579, N30623, |
| | | | | | AI655137, AW014522, BE564422, AI742717, |
| | | | | | BF028977, BE672098, AA777617, AI146844, |
| | | | | | AW577576, AI159827, AA563660, BF027920, |
| | | | | | AI637620, AI078792, AI990191, BF062933, |
| | | | | | BF062045, AW044164, BF770158, AA256059, |
| | | | | | N32225, BF769030, BF769032, BF445417, |
| | | | | | AA486679, AW959397, W22630, AA554325, |
| | | | | | R59984, AW006249, AW236554, AW577601, |
| | | | | | AA765281, AI653704, AI206329, R67166, |
| | | | | | AW243537, AA205674, H00645, T16860, AA256068, |
| | | | | | N57321, H00733, N41868, T16861, |
| | | | | | AI149479, AI906144, N59086, BF926652, AA909318, |
| | | | | | AW594490, AA299517, N58615, AA641283, |
| | | | | | AA644247, AW236428, AI820831, BG009693, |
| | | | | | BF851615, AA743510, Z42234, AA834460, |
| | | | | | AA548119, AI672532, F07004, Z40114, F01762, |
| | | | | | AA301407, BF085945, BF931293, AA205611, |
| | | | | | AI638784, BF085928, AA983380, BF059602, |
| | | | | | AW192770, BE714630, AA205702, AI078796, |
| | | | | | BC001039.1, AF310106.1, BC003592.1, AK000784.1, |
| | | | | | AK025952.1, AF298547.1, AK026387.1. |
| HTTEE41 | 95 | 840950 | 1-1959 | 15-1973 | AL533251, AL514520, AL535565, AL519250, |
| | | | | | AU120401, AL514519, AL513606, AL517678, |
| | | | | | AI986262, AU139509, AU138912, BF797374, |
| | | | | | AU124362, AV714807, AI970836, T25350, |
| | | | | | BG169633, AU126517, BG031251, AA854925, |
| | | | | | AI683290, AI084631, AU130264, BE748699, |
| | | | | | AU124315, AU133858, BG109529, AU135232, |
| | | | | | AI080278, BG119840, AI114754, BG258768, |
| | | | | | BG255494, BE786284, AI955296, AU126258, |
| | | | | | BG254492, BF057590, AI342485, BE907879, |
| | | | | | AV689488, BG035949, AV688329, BE780740, |
| | | | | | AI982815, BE897302, AL037847, BE619295, |
| | | | | | BF037149, BE547405, BE540421, BE870861, |
| | | | | | BG119545, BE891546, BE872237, BG179989, |
| | | | | | BE784107, AI992184, AU128577, BE893297, |
| | | | | | BE798745, AI858401, BE871280, BE882225, |
| | | | | | AI801143, BE748021, BG033360, BF984307, |
| | | | | | BF795054, BE535364, BE870845, AV711098, |
| | | | | | BG115930, BE787681, BE542328, BE872802, |
| | | | | | BF700048, BF695387, AI674907, BE439607, |
| | | | | | BF984686, AW079041, BG166631, BE896320, |
| | | | | | BE541060, BG168465, BF212903, BG165234, |
| | | | | | BF036631, AW276472, AI469127, BG116642, |
| | | | | | AW304879, BG035549, BE298292, BE383409, |
| | | | | | AW951669, BE789205, AA876301, AI559157, |
| | | | | | BE618039, BE569054, BE884211, AA314410, |
| | | | | | AL037869, BF034922, BG261406, BE278215, |
| | | | | | AI567289, AI216294, BE536033, AA160646, |
| | | | | | BE541100, AI652229, BF793118, AA573870, |
| | | | | | BE781061, AW675729, AV717435, AW967121, |
| | | | | | AW268555, AW614767, BE871948, BF246592, |
| | | | | | AW302409, BG231674, AL519249, AI623915, |
| | | | | | AA633523, BG056451, AI554391, BF593678, |
| | | | | | AL513605, AA541705, BE536986, BE540075, |
| | | | | | BE893524, BF211942, AW403677, BE302004, |
| | | | | | BF030769, AA639701, AW675653, BG114666, |
| | | | | | BF305722, AI812111, AI003845, AI922596, |
| | | | | | AI610416, BE874043, AI690769, AI423245, BE884372, |
| | | | | | AI041880, BE972270, BE277936, AI970618, |
| | | | | | BE564025, AA569371, BE536189, AW517408, |
| | | | | | BF692138, AA838062, AW675629, BE544390, |
| | | | | | AA665762, AI129259, AI018744, AV717173, |
| | | | | | BE563964, BE278405, AU155033, AA779219, |
| | | | | | AA935682, AA306144, AA307298, AA707035, |
| | | | | | BF241179, BF207700, BE018391, BE964282, |
| | | | | | AA916194, BE567396, AA928532, AW197045, |
| | | | | | AA740956, AA877985, AI081121, AV751536, |
| | | | | | AA102457, AA160479, AA192686, AA574025, |
| | | | | | AU146473, AV739405, AA242865, AI249678, |
| | | | | | AA081834, AI566278, BF212412, AA188046, |
| | | | | | BF242025, AL517677, W22339, AV748102, |
| | | | | | AW001935, AU157811, AA634515, AI151103, |
| | | | | | AI027752, AV752496, AA031432, BE535794, |
| | | | | | AA838373, BG166698, AW023950, AA514375, |
| | | | | | BE540980, BE222647, AI027493, AA308098, |
| | | | | | AI499910, AU150842, AI537313, BE258575, |
| | | | | | AW468963, AA665209, BF208112, AI288710, |
| | | | | | AI074560, AA758489, AA307507, AU128978, |
| | | | | | AL121077, AA224142, BE551072, AU152253, |
| | | | | | AI589777, AA242864, AA865406, AI086547, |
| | | | | | AA159666, AI082436, AW953920, AA143173, |
| | | | | | BE909718, AW089251, AI240700, W72593, |
| | | | | | AI919263, AF026166.1, AF026293.1, U91327.1, |
| | | | | | T55193, T70199, T88741, T91070, R11411, R12294, |
| | | | | | R12806, R19161, R25132, R25131, |
| | | | | | H02506, H02507, H54342, H56330, H63377, H63378, N21157, |
| | | | | | N29115, N70633, N98764, W00501, |
| | | | | | W02093, W05515, W30995, W32188, W45121, W52697, |
| | | | | | W76587, AA022658, AA022740, AA031431, |
| | | | | | AA047132, AA045726, AA053378, AA053093, |
| | | | | | AA084605, AA136549, AA142896, AA151835, |
| | | | | | AA151836, AA159771, AA187179, AA192116, |
| | | | | | AA224141, AA233936, AA232345, AA488991, |
| | | | | | AA534693, AA586488, AA623003, AA740505, |
| | | | | | AA829738, AA829916, AA876221, AA932434, |
| | | | | | AA933813, AA968745, AA969795, AI089838, |
| | | | | | D81695, N84531, C00761, N87565, |
| | | | | | C14312, C14469, AA641463, C17845, AA209312, AA401491, |
| | | | | | AA400238, AA598835, AA644299, AA705865, |
| | | | | | AA723334, AA852740, AA852739, AI076109, |
| | | | | | T23525, T16205, T27335, T27402. |
| HTXJD85 | 96 | 840391 | 1-1103 | 15-1117 | BF511613, R16403, H06356, AC005874.3, |
| | | | | | AF134471.1, AC018828.3, AC022383.3, AC005261.1, |
| | | | | | AL031588.1, AL132653.22, AC008649.6, AP000689.1, |
| | | | | | AB003151.1, AC005080.2, Z94056.1, |
| | | | | | AF243527.1, AC011308.8, AC016637.6, AL355074.5, |
| | | | | | AL391259.15, AC018808.4, AL355543.13, |
| | | | | | AC034193.4, AC008569.6, AC001231.2, AL354720.14. |
| HUVDJ48 | 97 | 564853 | 1-1813 | 15-1827 | AI479925, AV720735, AI886110, AF261918.1, |
| | | | | | AB037733.1. |
| HWBBU75 | 98 | 780360 | 1-2717 | 15-2731 | BG254332, BG258993, AW189216, AW189167, |
| | | | | | BG110226, AA621650, AI524238, AW027302, |
| | | | | | AI085248, AI187104, AJ403112, AW129561, |
| | | | | | AA287508, AA287381, AI569606, AW137239, |
| | | | | | AI814239, BE246677, BF356218, H87267, |
| | | | | | AI831754, H87322, W15561, AA831701, AA808000, |
| | | | | | BE086121, AW137386, AA932127, H92853, |
| | | | | | BF916818, R84247, BE672348, BF869463, AI380578, |
| | | | | | BE696648, N80792, AA811717, AA922507, |
| | | | | | BF945407, AK024474.1. |
| HWHPB78 | 99 | 740778 | 1-1332 | 15-1346 | AA004226, AA007259, AW071800, AW337233, |
| | | | | | BF684823, BE560744, AU143103, BF981277, |
| | | | | | AL528300, BE890251, AL525528, BE561304, |
| | | | | | AL534641, AW812566, AI198256, AL523832, |
| | | | | | AL527753, BE513546, AW812538, BE019389, |
| | | | | | BE560550, BE295978, BE410204, BE396701, |
| | | | | | BE397300, BF311702, BE734414, BE407616, |
| | | | | | AW390317, BF311227, BF125626, AA564034, |
| | | | | | AW732876, BE900601, AU130458, BE884575, |
| | | | | | BF206225, BE260519, BF218274, AL043160, |
| | | | | | BG116256, BE281524, Z41929, BE398062, |
| | | | | | BE251451, BE560915, BF317183, BE939837, H12990, |
| | | | | | H23167, BE780064, AA172145, BE312987, |
| | | | | | BG166994, BE314032, BE312450, BE390267, |
| | | | | | BE559942, AL120269, BG034775, BF315481, |
| | | | | | AB033099.1, BC002542.1, BC007803.1, AK024028.1, |
| | | | | | AK001571.1, AF343078.1, AL391244.11, AC004799.1, |
| | | | | | AC011737.10, AL137792.11, AC008755.6, |
| | | | | | AC007421.12. |
| HWLBO67 | 100 | 834315 | 1-522 | 15-536 | AC011739.7. |
| HWLGP26 | 101 | 834770 | 1-1884 | 15-1898 | AL529987, AV699741, BF530871, AW207742, |
| | | | | | AI638032, BE540656, AI469103, AW575118, |
| | | | | | BE503442, AI652512, AA928729, AW592532, |
| | | | | | AI419960, AI057140, BF102699, AI365238, |
| | | | | | AI392687, N49757, AA832314, BF819685, |
| | | | | | AI025113, AI767982, AA766124, AU151363, |
| | | | | | AW402473, AI654109, AW070683, AI738949, |
| | | | | | AA815032, BG231904, AW578625, AI365240, |
| | | | | | AV688777, AA769270, AW613566, AA605050, |
| | | | | | AI459543, AI885560, AW361738, AV689923, |
| | | | | | AA046663, BE242932, BF895261, AA507121, |
| | | | | | AA046576, AI627311, AW296010, AA814924, |
| | | | | | BG253328, BE789823, BE243489, AA298793, |
| | | | | | AI458707, AI208523, AA694217, BE247085, |
| | | | | | AW137352, AV689313, AA077726, BE241524, |
| | | | | | AL523598, AV685517, BE241950, AV697781, |
| | | | | | AV691130, AV688018, AV697631, N52685, |
| | | | | | AW182301, AA910584, AA126044, AW390687, |
| | | | | | AL529988, AF176097.1, AK023002.1, AJ131891.2. |
| HILCA24 | 102 | 869856 | 1-1968 | 15-1982 | BE780749, AU137314, AV732875, AW954734, |
| | | | | | AW138881, BF681107, AI079555, AI624252, |
| | | | | | AA233208, AU157126, AI734898, AW088851, |
| | | | | | BE221267, AA314962, AV715966, AA971982, |
| | | | | | AA233124, AA129416, AA133798, AA886808, |
| | | | | | AA353195, AW132033, T98200, H50558, AI888751, |
| | | | | | AI818363, BF917932, BF926224, AI784628, |
| | | | | | H50559, T98201, AK001989.1, AL512750.1, |
| | | | | | AC010627.5, AC010491.3, AC026749.5, AC016656.5, |
| | | | | | AC016652.5. |
| HE2CA60 | 103 | 888705 | 1-3020 | 15-3034 | AL535023, AL514917, AV727366, AW960741, |
| | | | | | BF970019, AV711225, AV658809, AV721596, |
| | | | | | AV658785, AU126984, AV693513, BF129964, |
| | | | | | AI140773, BF576888, BF929570, BF102505, |
| | | | | | BF677857, BF697387, AW006994, BF448157, |
| | | | | | AI302186, AW770389, AI888667, AA215792, |
| | | | | | AI337827, BF701132, AI573244, AW173639, |
| | | | | | AI870916, AI635189, AI678655, AI379341, |
| | | | | | AV748873, AI417164, AI023944, AW769389, |
| | | | | | AW021198, N39649, AA311424, AA593881, |
| | | | | | BF693869, AI538428, BF343015, BE350890, |
| | | | | | AA527258, AA446972, BF693703, AI673388, |
| | | | | | AV725444, AI160026, AW166928, AW084026, |
| | | | | | AI246492, AV728808, AI865154, AA535263, |
| | | | | | AA278438, AW958219, AI598040, N50839, |
| | | | | | AV703798, AV726287, AI567526, AA568228, |
| | | | | | AA780953, N90778, AW467601, AA411969, |
| | | | | | AI038481, H27220, AW296240, AA253481, W93347, |
| | | | | | AA232931, BE439630, AA932649, BF914259, |
| | | | | | AA716259, AW796151, AI080112, AI673834, |
| | | | | | AU156818, AV655775, AW190288, AA234891, |
| | | | | | AI953472, AA814625, AU158056, AI289270, |
| | | | | | AI702014, AI908123, AU154032, BE813629, |
| | | | | | AI446206, AA075083, AA232943, AI908087, |
| | | | | | AA621767, AI288409, AI961349, AA075001, |
| | | | | | AI470257, AA573515, AV686052, AV683900, |
| | | | | | AV708123, AA906650, AA598599, N75631, |
| | | | | | N22393, R87834, H28574, C20658, BF214864, |
| | | | | | BE089894, BE089889, BE089884, BE568741, |
| | | | | | BE177263, AW103250, AI567153, AA029909, |
| | | | | | AV707840, AI277579, N66892, D11764, |
| | | | | | AA588488, AV713215, AI091052, AA760879, AA451779, |
| | | | | | AA436604, AA449973, AW952511, AA743486, |
| | | | | | H88193, AA761104, AA887248, AI537734, Z28798, |
| | | | | | AI868443, H27622, AA460194, BE769290, |
| | | | | | BF213107, AA215630, AW369729, AV748115, |
| | | | | | AI630957, AI217501, BE765338, BE243642, |
| | | | | | N49735, AA030038, AL535022, AW973619, |
| | | | | | BE715613, AU119491, BE715618, T32443, |
| | | | | | R41621, AI908149, R18666, D62030, BE715610, |
| | | | | | BE715622, BF240978, AI492659, AV721162, |
| | | | | | BE715623, AA412738, AI929527, AI870127, |
| | | | | | BF155088, AA337914, AI886159, AI880332, |
| | | | | | R87759, AA578074, BF347940, C03599, AW149323, |
| | | | | | AI858885, AW582368, BE715600, R23365, |
| | | | | | AA503713, N56115, AA861658, AA429509, AW937431, |
| | | | | | AV712224, AI587356, AA279034, AA730462, |
| | | | | | AA366526, AA331496, BE769848, AW582361, |
| | | | | | AI908105, BF198101, BE768029, AI525041, |
| | | | | | AI566976, AA252936, BE167506, AA337416, H88194, |
| | | | | | AW805194, Z28797, AA375774, AA337493, |
| | | | | | AA304794, N26583, AA248761, AA336736, |
| | | | | | AA918009, N86808, BE768102, N56183, |
| | | | | | BF813368, AA332577, AW360775, BF699012, AW607859, |
| | | | | | AA037239, AA234184, AW385045, R94890, |
| | | | | | BE768193, AA248808, AA377361, AI679117, N87842, |
| | | | | | BF208805, AW610530, R58320, BE172045, |
| | | | | | AA218663, AW472993, BF448490, AA587998, |
| | | | | | AA668344, T55233, AW089673, N54694, |
| | | | | | AI950073, BF240775, AA995161, AB034205.1, |
| | | | | | AC005921.3, AK027723.1, AL050121.1, AF069250.1, |
| | | | | | AK023672.1, AK001925.1, AF147357.1, |
| | | | | | AC007383.4, AC006336.4, AL161899.21, AC019159.8, |
| | | | | | U95739.1, AL355834.4, AP001699.1, |
| | | | | | AC006994.4, AC016652.5, BC000799.1, BC006832.1, |
| | | | | | BC006103.1, AL449305.4, AC012502.3, |
| | | | | | AC006373.3, AC019176.4, AC005291.1, AP001623.1, |
| | | | | | AL133325.20, AL355512.22, AC012368.6, |
| | | | | | AC010088.3, AC004383.1, AL360294.11, AC007298.17, |
| | | | | | AC066585.5, AP001746.1, AL133258.16, |
| | | | | | AC026431.3, AC010319.7, AL136850.1, AP000130.1, |
| | | | | | AP000208.1, AF124728.1, AL121656.2, |
| | | | | | AC022402.4, AL133665.1, AP000247.1, AC016144.13, |
| | | | | | AK000753.1, AC006039.2, AB050410.1, |
| | | | | | AC044797.5, AL512733.1, BC008078.1, AC010149.8, |
| | | | | | AC006222.1, AC024028.10, AC010081.4, |
| | | | | | AL050309.4, AC068715.5, AC006241.1, AF061943.1, |
| | | | | | AC010723.3, AC026888.6, AL133405.17, |
| | | | | | AC025735.4, AL137527.1, AC083867.4, AC006288.1, |
| | | | | | AL137558.1, AC006338.5, AP001346.1, |
| | | | | | N52664, AA278736, N88556. |
| HPWTF23 | 104 | 844775 | 1-1994 | 15-2008 | AL519322, AL519321, AL528621, AL525472, |
| | | | | | AV708533, AV707483, BG117131, AV701688, |
| | | | | | AW954252, AV701690, AL525317, BF968790, |
| | | | | | AV709370, AV707363, AV657517, AI635895, |
| | | | | | AL036882, AW857209, AL036883, AV707606, |
| | | | | | BF128575, BG121441, BE295239, AW392020, |
| | | | | | BF311431, AV762694, AV706829, AA523541, |
| | | | | | BE073173, BE295817, BF514386, BE675214, |
| | | | | | AI949219, AW262884, BE858056, BG055038, |
| | | | | | BG249916, BG037033, AW371034, AI674706, |
| | | | | | AI708919, AV715587, AA535070, AA679292, |
| | | | | | AW022838, N50052, BE830095, AU148045, |
| | | | | | BE870349, BE349624, BE350028, BF837239, |
| | | | | | AA147899, BF845844, AW073776, AU147814, |
| | | | | | BF725674, AI368808, AI927857, AI342463, |
| | | | | | AV701888, AI140105, AA487093, AV750709, |
| | | | | | BE858057, AW190710, AA147844, AI096573, |
| | | | | | AA716187, AA722314, AI862165, W63717, |
| | | | | | AW262935, AA906753, AL525667, AV748474, |
| | | | | | AI269618, AI760874, AI074133, AA662310, |
| | | | | | AI924825, AI309724, AW468063, AA613662, |
| | | | | | W76557, AI089512, AI984192, AI707646, AA459957, |
| | | | | | AI624320, BE164613, BF967589, AW029309, |
| | | | | | AI640395, AI128327, AW176265, AW167854, |
| | | | | | AA040063, W46859, AI570042, AA618091, |
| | | | | | AI144525, AA010681, AI379204, AA460046, |
| | | | | | AA862301, AA599534, AV743247, BE138816, |
| | | | | | AV650781, W67232, AA971998, AI310729, N62277, |
| | | | | | AI597921, AI978845, AI671691, AI766634, |
| | | | | | W72563, AW316882, AI570060, AA135362, R52727, |
| | | | | | AW468339, AA516433, AW276147, AI800083, |
| | | | | | AI572626, AI272092, AI368167, N50029, AI865786, |
| | | | | | AI708598, AW316956, BE063387, AW007919, |
| | | | | | BF725145, AV650618, AV661271, T63404, |
| | | | | | AW243982, AA394163, AA431390, AV739478, |
| | | | | | AA018926, N47564, AV736149, AI480119, |
| | | | | | AW263269, AI039111, AV650298, W60279, |
| | | | | | AA765950, AA775091, AV741361, AI672788, |
| | | | | | W92333, AI913079, AA602156, AA010680, |
| | | | | | AI312732, W58299, AI718214, AV744886, AI865478, |
| | | | | | W46821, AW338299, AA115222, AA026509, |
| | | | | | AA833692, T65926, BE676820, AW629236, |
| | | | | | AV760664, AV744890, AW512231, AI272268, |
| | | | | | T79429, AI420676, AI933008, AI720397, H44638, |
| | | | | | AI699112, W58190, AA318908, BE160746, |
| | | | | | AA576196, T60058, AA318968, AA335541, AA507838, |
| | | | | | AL038891, BE244391, AI567253, T33201, |
| | | | | | AI422399, BE242438, F28371, W92390, T27118, |
| | | | | | AV660511, AI198237, AA279281, T32253, |
| | | | | | AA987730, AI521033, AI582582, AA137239, W65468, |
| | | | | | H26544, AA115157, AI377668, BE245885, |
| | | | | | AA953911, BE241874, AI587551, R22214, AI918377, |
| | | | | | AW779069, AA953835, AV760987, T79517, |
| | | | | | AW263932, W65469, AI524412, BE241477, AI955974, |
| | | | | | AW023746, BE160914, AV746796, AI216726, |
| | | | | | BE831539, AI184048, AI598049, AA148643, |
| | | | | | AI246336, AI538030, W46870, T60102, |
| | | | | | BE179366, AI224380, F09314, AW663101, T63029, |
| | | | | | AA043646, AA302796, T65354, BE243054, |
| | | | | | BE063421, T30199, AY007119.1, AF183393.1, |
| | | | | | AF228339.1, AB025432.1, AF153603.1, AL110191.1, |
| | | | | | Z50781.1, T63278, T64499, R22268, R34893, |
| | | | | | R49280, R49280, H43597, R86094, |
| | | | | | N47563, N54684, N54707, N77565, W60371, W67342, |
| | | | | | AA019007, AA148642, AA190663, AA464495, |
| | | | | | AA464496, AA427718, AA429282, AA244422, |
| | | | | | AA244455, AA551457, D79925, N85667, |
| | | | | | C20552, AA652629, AA652778, AA292345, AA293158, |
| | | | | | AA293176, AA292756, AA432382, AA835434, |
| | | | | | AA909440, T24090, D45452, F11656, F11926, |
| | | | | | F09572. |
| HGCAC19 | 105 | 851527 | 1-5047 | 15-5061 | AL527635, AI582588, BE619956, AW003219, |
| | | | | | AW195551, AI114573, BE888827, BF444977, |
| | | | | | AU139098, AA307878, AI915534, AU117064, |
| | | | | | BE466128, BG251218, BE619434, AI700569, |
| | | | | | AI823371, BG260998, AI625554, AI478557, |
| | | | | | AW958690, AI052694, AW963950, AL134475, |
| | | | | | AU136749, BE326684, AW770747, AI803406, |
| | | | | | AI990669, BF448130, AW770442, AI193790, |
| | | | | | AI659257, AV757384, AI669806, BE835313, |
| | | | | | AI917737, AA947974, BE881668, BE466358, |
| | | | | | AI698025, BF061334, BF433914, BE551956, |
| | | | | | AW003148, BF055107, AW237192, BE646481, |
| | | | | | AW949672, AA910441, AA994008, AA804520, |
| | | | | | AW058531, AI247672, BE890358, AA156928, |
| | | | | | AI767577, AW949361, AW166817, BG104926, |
| | | | | | AI971146, AW299771, AI990108, AI631706, |
| | | | | | BG114047, AA824598, AA156804, AA312557, |
| | | | | | AA677603, AI636032, AI400786, BE768656, |
| | | | | | AI199770, AI989485, AA155855, AI802754, |
| | | | | | AV650187, AW014065, BF677900, BF680207, |
| | | | | | AA557259, AI925305, AA446690, AI261268, |
| | | | | | AW150014, AA155958, BE379872, BF215025, |
| | | | | | AW867051, BE672462, BE168338, AI350222, |
| | | | | | AI624072, AI825185, AA436183, AA916694, |
| | | | | | AA436309, AW867047, BE139075, BF530119, |
| | | | | | AI656311, AV755927, AV746485, AW770099, |
| | | | | | AA147323, BE768554, AI885519, BE768542, |
| | | | | | AA446565, AI821288, BE245294, AW129764, |
| | | | | | AA599626, AW818369, BE245262, AI536551, |
| | | | | | AI040161, AI446564, AI627777, AA020816, |
| | | | | | AV758283, D80771, AA806383, AA136672, |
| | | | | | H40373, BE042467, AA013438, AI591292, AW472897, |
| | | | | | AI821040, AI820997, AA180321, AI356314, |
| | | | | | AA312855, AI610014, BF902177, AW195825, C75219, |
| | | | | | AW015240, AI936012, AI219472, AA086094, |
| | | | | | AW169820, AW983970, AA113317, AI282736, |
| | | | | | BE175626, BF061715, AI275943, AW294050, |
| | | | | | AV738635, AA358726, AA463692, BF896130, |
| | | | | | AW183617, H21867, BE168125, AI246262, |
| | | | | | AA059237, AA677761, AA628617, BE768595, |
| | | | | | AI625290, AA007519, BE768665, AW374169, |
| | | | | | AA355425, T07209, AA377468, AW271631, |
| | | | | | AA152212, AW189878, AA086093, AW594290, |
| | | | | | AA742173, AI949786, AW023249, AW750461, |
| | | | | | AA256785, BE872264, AA709003, AA147425, |
| | | | | | AA361135, H40320, AW392416, AW392849, |
| | | | | | BF081349, AI038854, AW188893, BE763982, |
| | | | | | AA976161, AA345273, AW858464, AW891017, |
| | | | | | D52302, AA358727, AI699855, D61215, |
| | | | | | D52967, AA430996, AW376216, R81478, AW501079, |
| | | | | | AA007520, AA353267, AA728991, AA304423, |
| | | | | | AA356393, AI370683, AW024132, T71726, |
| | | | | | AA361495, AV724116, AI888048, BF844493, |
| | | | | | T40389, BF089968, T71578, AA621423, AW043940, |
| | | | | | AA513522, BF763717, R62569, BF950322, |
| | | | | | AA334984, BF091136, BE892057, AW188923, |
| | | | | | AA826001, N24122, BE768735, AW382160, |
| | | | | | BF985865, T18537, BF365430, AI830982, AW452149, |
| | | | | | AW188842, BE702825, AI637868, AA732593, |
| | | | | | AA376840, AW858513, BF804806, D19713, |
| | | | | | AW131746, AA256511, AA829191, AI310882, |
| | | | | | AF109907.1, L40392.1, AK026107.1, AC004858.2, |
| | | | | | S67071.1, AF135593.1, AC006345.4, T60745, |
| | | | | | R25599, R26428, R26995, AA136788, AA150143, |
| | | | | | AA888518, AI053404, AI053507, AI053899, |
| | | | | | N64912, N64913, C00711, AA393814, AA905385, |
| | | | | | AI002840. |
| HEQBJ01 | 106 | 876546 | 1-2777 | 15-2791 | AU123703, AI744148, AI744113, AU130720, |
| | | | | | BE897357, BG105308, AU137281, BF308835, |
| | | | | | AI860811, AI889014, AI765413, BE546221, |
| | | | | | BE670583, AW237314, BG248530, AW952369, |
| | | | | | BE502734, BE503479, AI765401, BE540301, |
| | | | | | AL042645, BF212478, AW500417, BG249708, |
| | | | | | AW674190, AI867571, BE018153, AW293518, |
| | | | | | AA534578, AI432178, AW169762, AA506984, |
| | | | | | BE389321, AA420605, AI142237, AA406169, |
| | | | | | AW591668, AW188054, AI147954, AA430324, |
| | | | | | AL040186, AI197943, AW502601, AI589634, |
| | | | | | AA569041, AI015938, AA433904, AA070872, |
| | | | | | AI188829, AI124780, AA421239, AI149224, |
| | | | | | AA420647, AI916160, W73655, AI076564, AI768356, |
| | | | | | BF592904, BE464156, AW772442, BE219974, |
| | | | | | AI638215, BG034042, AI125307, R51293, BE812953, |
| | | | | | W51790, AA172002, AA425349, AA565222, |
| | | | | | AA313542, AA825728, R35270, AW204507, |
| | | | | | BF306159, BG152825, AA100809, W28763, |
| | | | | | BF223048, AI222042, AI479185, W26572, W45413, |
| | | | | | W73608, R52192, AI160529, AW440819, |
| | | | | | AI422286, AI298011, AA171761, AA421279, R51403, |
| | | | | | H62930, R52097, R59309, BF880022, |
| | | | | | AA581790, W81419, BF844067, AI768849, W40121, |
| | | | | | AI708313, AW511347, AA373236, AW368276, |
| | | | | | BF844000, AA434583, AV747735, Z42217, |
| | | | | | BE702753, W81420, AI962360, AA325784, |
| | | | | | BF879714, R59310, AI271621, T25845, BF879715, |
| | | | | | T06069, F05246, BF880008, AA806028, |
| | | | | | Z38264, AA071023, AA815452, N54389, BE929180, |
| | | | | | BE929187, BE929175, BF092052, AA810542, |
| | | | | | AA383377, AI370602, R50941, T87272, BF149192, |
| | | | | | T87186, AW867815, F01748, AA947741, |
| | | | | | BF749400, AA773493, AA890049, AW591526, AI985779, |
| | | | | | AA984284, BF923416, AW272799, AL043147, |
| | | | | | AB007891.1, BC002701.1, AC009079.4, |
| | | | | | AL157384.8, AK025058.1, AK026926.1, AC009779.18. |
| HBJHT01 | 107 | 587262 | 1-1237 | 15-1251 | AW572853, AW852662, AW794904, AW852694, |
| | | | | | AA494184, BE092308, AW467441, BG000611, |
| | | | | | BF871414, BF871418, AA715850, AW962959, |
| | | | | | AI281561, BF899671, AI537814, BF899672, |
| | | | | | BF970033, BF899670, AW975902, BF847493, |
| | | | | | AW197990, AC084865.2, AL590763.1, AC008403.6, |
| | | | | | AC002551.1, AP001858.4, AP001692.1, AL450224.1, |
| | | | | | AL160269.14, AL022476.2, AL049762.20, |
| | | | | | AC011811.42, AL356020.3, AC078818.19, AC007842.1, |
| | | | | | AC007055.3, AC008569.6, AC005803.1, |
| | | | | | AB020865.1, AL353574.8, AL138836.15, AJ277546.2, |
| | | | | | Z93930.10, AC005484.2, AC069548.4, |
| | | | | | AC007619.22, L44140.1, AL158040.13, Z95115.1, |
| | | | | | AF196779.1, AC009155.3, AP003116.2, |
| | | | | | AC005548.1, AL354696.11, AC005254.1, AL353579.17, |
| | | | | | AC012323.7, AC007371.16, AL049780.4, |
| | | | | | AC000353.27, AL022336.1, AC009309.4, AL158830.17, |
| | | | | | AC005488.2, AL591076.5, AC007954.7, |
| | | | | | AL031664.1, AC000025.2, AL121586.31, AC004859.2, |
| | | | | | AL365364.19, AL049757.14, AL390205.17, |
| | | | | | AC007011.1, AL353812.13, AL157877.11, AP000893.5, |
| | | | | | AL021391.2, AC087244.17, Y10196.1, |
| | | | | | AF001549.1, U91323.1, AL096701.14, AC034193.4, |
| | | | | | AP000501.1, AC022211.5, AC011472.7, |
| | | | | | AP002852.3, AL031650.22, AC008745.6, AC011005.7, |
| | | | | | AC006930.1, AF053356.1, AL133174.15, |
| | | | | | AL137918.4, AP001715.1, AC018808.4, AC009488.5, |
| | | | | | AC027319.5, AL110115.38. |

Description of Table 4

[0153] Table 4 provides a key to the tissue/cell source identifier code disclosed in Table 1B.2, column 5. Column 1 of Table 4 provides the tissue/cell source identifier code disclosed in Table 1B.2, Column 58. Columns 2-5 provide a description of the tissue or cell source. Note that “Description” and “Tissue” sources (i.e. columns 2 and 3) having the prefix “a_” indicates organs, tissues, or cells derived from “adult” sources. Codes corresponding to diseased tissues are indicated in column 6 with the word “disease.” The use of the word “disease” in column 6 is non-limiting. The tissue or cell source may be specific (e.g. a neoplasm), or may be disease-associated (e.g., a tissue sample from a normal portion of a diseased organ). Furthermore, tissues and/or cells lacking the “disease” designation may still be derived from sources directly or indirectly involved in a disease state or disorder, and therefore may have a further utility in that disease state or disorder. In numerous cases where the tissue/cell source is a library, column 7 identifies the vector used to generate the library.

TABLE 4

| Code | Description | Tissue | Organ | Cell Line | Disease | Vector |
|---|---|---|---|---|---|---|
| AR022 | a_Heart | a_Heart | | | | |
| AR023 | a_Liver | a_Liver | | | | |
| AR024 | a_mammary gland | a_mammary gland | | | | |
| AR025 | a_Prostate | a_Prostate | | | | |
| AR026 | a_small intestine | a_small intestine | | | | |
| AR027 | a_Stomach | a_Stomach | | | | |
| AR028 | Blood B cells | Blood B cells | | | | |
| AR029 | Blood B cells activated | Blood B cells activated | | | | |
| AR030 | Blood B cells resting | Blood B cells resting | | | | |
| AR031 | Blood T cells activated | Blood T cells activated | | | | |
| AR032 | Blood T cells resting | Blood T cells resting | | | | |
| AR033 | brain | brain | | | | |
| AR034 | breast | breast | | | | |
| AR035 | breast cancer | breast cancer | | | | |
| AR036 | Cell Line CAOV3 | Cell Line CAOV3 | | | | |
| AR037 | cell line PA-1 | cell line PA-1 | | | | |
| AR038 | cell line transformed | cell line transformed | | | | |
| AR039 | colon | colon | | | | |
| AR040 | colon (9808co65R) | colon (9808co65R) | | | | |
| AR041 | colon (9809co15) | colon (9809co15) | | | | |
| AR042 | colon cancer | colon cancer | | | | |
| AR043 | colon cancer (9808co64R) | colon cancer (9808co64R) | | | | |
| AR044 | colon cancer 9809co14 | colon cancer 9809co14 | | | | |
| AR050 | Donor II B Cells 24 hrs | Donor II B Cells 24 hrs | | | | |
| AR051 | Donor II B Cells 72 hrs | Donor II B Cells 72 hrs | | | | |
| AR052 | Donor II B-Cells 24 hrs. | Donor II B-Cells 24 hrs. | | | | |
| AR053 | Donor II B-Cells 72 hrs | Donor II B-Cells 72 hrs | | | | |
| AR054 | Donor II Resting B Cells | Donor II Resting B Cells | | | | |
| AR055 | Heart | Heart | | | | |
| AR056 | Human Lung (clonetech) | Human Lung (clonetech) | | | | |
| AR057 | Human Mammary | Human Mammary (clontech) | | | | |
| | (clontech) | | | | | |
| AR058 | Human Thymus | Human Thymus (clonetech) | | | | |
| | (clonetech) | | | | | |
| AR059 | Jurkat (unstimulated) | Jurkat (unstimulated) | | | | |
| AR060 | Kidney | Kidney | | | | |
| AR061 | Liver | Liver | | | | |
| AR062 | Liver (Clontech) | Liver (Clontech) | | | | |
| AR063 | Lymphocytes chronic | Lymphocytes chronic | | | | |
| | lymphocytic leukaemia | lymphocytic leukaemia | | | | |
| AR064 | Lymphocytes diffuse large | Lymphocytes diffuse large B | | | | |
| | B cell lymphoma | cell lymphoma | | | | |
| AR065 | Lymphocytes follicular | Lymphocytes follicular | | | | |
| | lymphoma | lymphoma | | | | |
| AR066 | normal breast | normal breast | | | | |
| AR067 | Normal Ovarian (4004901) | Normal Ovarian (4004901) | | | | |
| AR068 | Normal Ovary 9508G045 | Normal Ovary 9508G045 | | | | |
| AR069 | Normal Ovary 9701G208 | Normal Ovary 9701G208 | | | | |
| AR070 | Normal Ovary 9806G005 | Normal Ovary 9806G005 | | | | |
| AR071 | Ovarian Cancer | Ovarian Cancer | | | | |
| AR072 | Ovarian Cancer | Ovarian Cancer (9702G001) | | | | |
| | (9702G001) | | | | | |
| AR073 | Ovarian Cancer | Ovarian Cancer (9707G029) | | | | |
| | (9707G029) | | | | | |
| AR074 | Ovarian Cancer | Ovarian Cancer (9804G011) | | | | |
| | (9804G011) | | | | | |
| AR075 | Ovarian Cancer | Ovarian Cancer (9806G019) | | | | |
| | (9806G019) | | | | | |
| AR076 | Ovarian Cancer | Ovarian Cancer (9807G017) | | | | |
| | (9807G017) | | | | | |
| AR077 | Ovarian Cancer | Ovarian Cancer (9809G001) | | | | |
| | (9809G001) | | | | | |
| AR078 | ovarian cancer 15799 | ovarian cancer 15799 | | | | |
| AR079 | Ovarian Cancer 17717AID | Ovarian Cancer 17717AID | | | | |
| AR080 | Ovarian Cancer | Ovarian Cancer 4004664B1 | | | | |
| | 4004664B1 | | | | | |
| AR081 | Ovarian Cancer | Ovarian Cancer 4005315A1 | | | | |
| | 4005315A1 | | | | | |
| AR082 | ovarian cancer 94127303 | ovarian cancer 94127303 | | | | |
| AR083 | Ovarian Cancer 96069304 | Ovarian Cancer 96069304 | | | | |
| AR084 | Ovarian Cancer 9707G029 | Ovarian Cancer 9707G029 | | | | |
| AR085 | Ovarian Cancer 9807G045 | Ovarian Cancer 9807G045 | | | | |
| AR086 | ovarian cancer 9809G001 | ovarian cancer 9809G001 | | | | |
| AR087 | Ovarian Cancer | Ovarian Cancer 9905C032RC | | | | |
| | 9905C032RC | | | | | |
| AR088 | Ovarian cancer 9907 C00 | Ovarian cancer 9907 C00 3rd | | | | |
| | 3rd | | | | | |
| AR089 | Prostate | Prostate | | | | |
| AR090 | Prostate (clonetech) | Prostate (clonetech) | | | | |
| AR091 | prostate cancer | prostate cancer | | | | |
| AR092 | prostate cancer #15176 | prostate cancer #15176 | | | | |
| AR093 | prostate cancer #15509 | prostate cancer #15509 | | | | |
| AR094 | prostate cancer #15673 | prostate cancer #15673 | | | | |
| AR095 | Small Intestine (Clontech) | Small Intestine (Clontech) | | | | |
| AR096 | Spleen | Spleen | | | | |
| AR097 | Thymus T cells activated | Thymus T cells activated | | | | |
| AR098 | Thymus T cells resting | Thymus T cells resting | | | | |
| AR099 | Tonsil | Tonsil | | | | |
| AR100 | Tonsil geminal center | Tonsil geminal center | | | | |
| | centroblast | centroblast | | | | |
| AR101 | Tonsil germinal center B | Tonsil germinal center B cell | | | | |
| | cell | | | | | |
| AR102 | Tonsil lymph node | Tonsil lymph node | | | | |
| AR103 | Tonsil memory B cell | Tonsil memory B cell | | | | |
| AR104 | Whole Brain | Whole Brain | | | | |
| AR105 | Xenograft ES-2 | Xenograft ES-2 | | | | |
| AR106 | Xenograft SW626 | Xenograft SW626 | | | | |
| AR119 | 001: IL-2 | 001: IL-2 | | | | |
| AR120 | 001: IL-2.1 | 001: IL-2.1 | | | | |
| AR121 | 001: IL-2_b | 001: IL-2_b | | | | |
| AR124 | 002: Monocytes untreated | 002: Monocytes untreated | | | | |
| | (1 hr) | (1 hr) | | | | |
| AR125 | 002: Monocytes untreated | 002: Monocytes untreated | | | | |
| | (5 hrs) | (5 hrs) | | | | |
| AR126 | 002: Control.1C | 002: Control.1C | | | | |
| AR127 | 002: IL2.1C | 002: IL2.1C | | | | |
| AR130 | 003: Placebo-treated Rat | 003: Placebo-treated Rat | | | | |
| | Lacrimal Gland | Lacrimal Gland | | | | |
| AR131 | 003: Placebo-treated Rat | 003: Placebo-treated Rat | | | | |
| | Submandibular Gland | Submandibular Gland | | | | |
| AR135 | 004: Monocytes untreated | 004: Monocytes untreated | | | | |
| | (5 hrs) | (5 hrs) | | | | |
| AR136 | 004: Monocytes untreated | 004: Monocytes untreated | | | | |
| | 1 hr | 1 hr | | | | |
| AR139 | 005: Placebo (48 hrs) | 005: Placebo (48 hrs) | | | | |
| AR140 | 006: pC4 (24 hrs) | 006: pC4 (24 hrs) | | | | |
| AR141 | 006: pC4 (48 hrs) | 006: pC4 (48 hrs) | | | | |
| AR152 | 007: PHA (1 hr) | 007: PHA (1 hr) | | | | |
| AR153 | 007: PHA (6 HRS) | 007: PHA (6 HRS) | | | | |
| AR154 | 007: PMA (6 hrs) | 007: PMA (6 hrs) | | | | |
| AR155 | 008: 1449_#2 | 008: 1449_#2 | | | | |
| AR161 | 01: A - max 24 | 01: A - max 24 | | | | |
| AR162 | 01: A - max 26 | 01: A - max 26 | | | | |
| AR163 | 01: A - max 30 | 01: A - max 30 | | | | |
| AR164 | 01: B - max 24 | 01: B - max 24 | | | | |
| AR165 | 01: B - max 26 | 01: B - max 26 | | | | |
| AR166 | 01: B - max 30 | 01: B - max 30 | | | | |
| AR167 | 1449 Sample | 1449 Sample | | | | |
| AR168 | 3T3P10 1.0 uM insulin | 3T3P10 1.0 uM insulin | | | | |
| AR169 | 3T3P10 10 nM Insulin | 3T3P10 10 nM Insulin | | | | |
| AR170 | 3T3P10 10 uM insulin | 3T3P10 10 uM insulin | | | | |
| AR171 | 3T3P10 No Insulin | 3T3P10 No Insulin | | | | |
| AR172 | 3T3P4 | 3T3P4 | | | | |
| AR173 | Adipose (41892) | Adipose (41892) | | | | |
| AR174 | Adipose Diabetic (41611) | Adipose Diabetic (41611) | | | | |
| AR175 | Adipose Diabetic (41661) | Adipose Diabetic (41661) | | | | |
| AR176 | Adipose Diabetic (41689) | Adipose Diabetic (41689) | | | | |
| AR177 | Adipose Diabetic (41706) | Adipose Diabetic (41706) | | | | |
| AR178 | Adipose Diabetic (42352) | Adipose Diabetic (42352) | | | | |
| AR179 | Adipose Diabetic (42366) | Adipose Diabetic (42366) | | | | |
| AR180 | Adipose Diabetic (42452) | Adipose Diabetic (42452) | | | | |
| AR181 | Adipose Diabetic (42491) | Adipose Diabetic (42491) | | | | |
| AR182 | Adipose Normal (41843) | Adipose Normal (41843) | | | | |
| AR183 | Adipose Normal (41893) | Adipose Normal (41893) | | | | |
| AR184 | Adipose Normal (42452) | Adipose Normal (42452) | | | | |
| AR185 | Adrenal Gland | Adrenal Gland | | | | |
| AR186 | Adrenal Gland + Whole | Adrenal Gland + Whole | | | | |
| | Brain | Brain | | | | |
| AR187 | B7(1 hr)+ (inverted) | B7(1 hr)+ (inverted) | | | | |
| AR188 | Breast (18275A2B) | Breast (18275A2B) | | | | |
| AR189 | Breast (4004199) | Breast (4004199) | | | | |
| AR190 | Breast (4004399) | Breast (4004399) | | | | |
| AR191 | Breast (4004943B7) | Breast (4004943B7) | | | | |
| AR192 | Breast (4005570B1) | Breast (4005570B1) | | | | |
| AR193 | Breast Cancer | Breast Cancer (4004127A30) | | | | |
| | (4004127A30) | | | | | |
| AR194 | Breast Cancer | Breast Cancer (400443A21) | | | | |
| | (400443A21) | | | | | |
| AR195 | Breast Cancer | Breast Cancer (4004643A2) | | | | |
| | (4004643A2) | | | | | |
| AR196 | Breast Cancer | Breast Cancer (4004710A7) | | | | |
| | (4004710A7) | | | | | |
| AR197 | Breast Cancer | Breast Cancer (4004943A21) | | | | |
| | (4004943A21) | | | | | |
| AR198 | Breast Cancer (400553A2) | Breast Cancer (400553A2) | | | | |
| AR199 | Breast Cancer | Breast Cancer (9805C046R) | | | | |
| | (9805C046R) | | | | | |
| AR200 | Breast Cancer | Breast Cancer (9806C012R) | | | | |
| | (9806C012R) | | | | | |
| AR201 | Breast Cancer (ODQ | Breast Cancer (ODQ 45913) | | | | |
| | 45913) | | | | | |
| AR202 | Breast Cancer | Breast Cancer (ODQ45913) | | | | |
| | (ODQ45913) | | | | | |
| AR203 | Breast Cancer | Breast Cancer (ODQ4591B) | | | | |
| | (ODQ4591B) | | | | | |
| AR204 | Colon Cancer (15663) | Colon Cancer (15663) | | | | |
| AR205 | Colon Cancer | Colon Cancer (4005144A4) | | | | |
| | (4005144A4) | | | | | |
| AR206 | Colon Cancer | Colon Cancer (4005413A4) | | | | |
| | (4005413A4) | | | | | |
| AR207 | Colon Cancer (4005570B1) | Colon Cancer (4005570B1) | | | | |
| AR208 | Control RNA #1 | Control RNA #1 | | | | |
| AR209 | Control RNA #2 | Control RNA #2 | | | | |
| AR210 | Cultured Preadipocyte | Cultured Preadipocyte (blue) | | | | |
| | (blue) | | | | | |
| AR211 | Cultured Preadipocyte | Cultured Preadipocyte (Red) | | | | |
| | (Red) | | | | | |
| AR212 | Donor II B-Cells 24 hrs | Donor II B-Cells 24 hrs | | | | |
| AR213 | Donor II Resting B-Cells | Donor II Resting B-Cells | | | | |
| AR214 | H114EP12 10 nM Insulin | H114EP12 10 nM Insulin | | | | |
| AR215 | H114EP12 (10 nM insulin) | H114EP12 (10 nM insulin) | | | | |
| AR216 | H114EP12 (2.6 ug/ul) | H114EP12 (2.6 ug/ul) | | | | |
| AR217 | H114EP12 (3.6 ug/ul) | H114EP12 (3.6 ug/ul) | | | | |
| AR218 | HUVEC #1 | HUVEC #1 | | | | |
| AR219 | HUVEC #2 | HUVEC #2 | | | | |
| AR221 | L6 undiff. | L6 undiff. | | | | |
| AR222 | L6 Undifferentiated | L6 Undifferentiated | | | | |
| AR223 | L6P8 + 10 nM Insulin | L6P8 + 10 nM Insulin | | | | |
| AR224 | L6P8 + HS | L6P8 + HS | | | | |
| AR225 | L6P8 10 nM Insulin | L6P8 10 nM Insulin | | | | |
| AR226 | Liver (00-06-A007B) | Liver (00-06-A007B) | | | | |
| AR227 | Liver (96-02-A075) | Liver (96-02-A075) | | | | |
| AR228 | Liver (96-03-A144) | Liver (96-03-A144) | | | | |
| AR229 | Liver (96-04-A138) | Liver (96-04-A138) | | | | |
| AR230 | Liver (97-10-A074B) | Liver (97-10-A074B) | | | | |
| AR231 | Liver (98-09-A242A) | Liver (98-09-A242A) | | | | |
| AR232 | Liver Diabetic (1042) | Liver Diabetic (1042) | | | | |
| AR233 | Liver Diabetic (41616) | Liver Diabetic (41616) | | | | |
| AR234 | Liver Diabetic (41955) | Liver Diabetic (41955) | | | | |
| AR235 | Liver Diabetic (42352R) | Liver Diabetic (42352R) | | | | |
| AR236 | Liver Diabetic (42366) | Liver Diabetic (42366) | | | | |
| AR237 | Liver Diabetic (42483) | Liver Diabetic (42483) | | | | |
| AR238 | Liver Diabetic (42491) | Liver Diabetic (42491) | | | | |
| AR239 | Liver Diabetic (99-09- | Liver Diabetic (99-09- | | | | |
| | A281A) | A281A) | | | | |
| AR240 | Lung | Lung | | | | |
| AR241 | Lung (27270) | Lung (27270) | | | | |
| AR242 | Lung (2727Q) | Lung (2727Q) | | | | |
| AR243 | Lung Cancer (4005116A1) | Lung Cancer (4005116A1) | | | | |
| AR244 | Lung Cancer (4005121A5) | Lung Cancer (4005121A5) | | | | |
| AR245 | Lung Cancer | Lung Cancer (4005121A5)) | | | | |
| | (4005121A5)) | | | | | |
| AR246 | Lung Cancer (4005340A4) | Lung Cancer (4005340A4) | | | | |
| AR247 | Mammary Gland | Mammary Gland | | | | |
| AR248 | Monocyte (CT) | Monocyte (CT) | | | | |
| AR249 | Monocyte (OCT) | Monocyte (OCT) | | | | |
| AR250 | Monocytes (CT) | Monocytes (CT) | | | | |
| AR251 | Monocytes (INFG 18 hr) | Monocytes (INFG 18 hr) | | | | |
| AR252 | Monocytes (INFG 18 hr) | Monocytes (INFG 18 hr) | | | | |
| AR253 | Monocytes (INFG 8-11) | Monocytes (INFG 8-11) | | | | |
| AR254 | Monocytes (O CT) | Monocytes (O CT) | | | | |
| AR255 | Muscle (91-01-A105) | Muscle (91-01-A105) | | | | |
| AR256 | Muscle (92-04-A059) | Muscle (92-04-A059) | | | | |
| AR257 | Muscle (97-11-A056d) | Muscle (97-11-A056d) | | | | |
| AR258 | Muscle (99-06-A210A) | Muscle (99-06-A210A) | | | | |
| AR259 | Muscle (99-07-A203B) | Muscle (99-07-A203B) | | | | |
| AR260 | Muscle (99-7-A203B) | Muscle (99-7-A203B) | | | | |
| AR261 | Muscle Diabetic (42352R) | Muscle Diabetic (42352R) | | | | |
| AR262 | Muscle Diabetic (42366) | Muscle Diabetic (42366) | | | | |
| AR263 | NK-19 Control | NK-19 Control | | | | |
| AR264 | NK-19 IL Treated 72 hrs | NK-19 IL Treated 72 hrs | | | | |
| AR265 | NK-19 UK Treated 72 hrs. | NK-19 UK Treated 72 hrs. | | | | |
| AR266 | Omentum Normal (94-08- | Omentum Normal (94-08- | | | | |
| | B009) | B009) | | | | |
| AR267 | Omentum Normal (97-01- | Omentum Normal (97-01- | | | | |
| | A039A) | A039A) | | | | |
| AR268 | Omentum Normal (97-04- | Omentum Normal (97-04- | | | | |
| | A114C) | A114C) | | | | |
| AR269 | Omentum Normal (97-06- | Omentum Normal (97-06- | | | | |
| | A117C) | A117C) | | | | |
| AR270 | Omentum Normal (97-09- | Omentum Normal (97-09- | | | | |
| | B004C) | B004C) | | | | |
| AR271 | Ovarian Cancer | Ovarian Cancer (17717AID) | | | | |
| | (17717AID) | | | | | |
| AR272 | Ovarian Cancer | Ovarian Cancer | | | | |
| | (9905C023RC) | (9905C023RC) | | | | |
| AR273 | Ovarian Cancer | Ovarian Cancer | | | | |
| | (9905C032RC) | (9905C032RC) | | | | |
| AR274 | Ovary (9508G045) | Ovary (9508G045) | | | | |
| AR275 | Ovary (9701G208) | Ovary (9701G208) | | | | |
| AR276 | Ovary 9806G005 | Ovary 9806G005 | | | | |
| AR277 | Pancreas | Pancreas | | | | |
| AR278 | Placebo | Placebo | | | | |
| AR279 | rIL2 Control | rIL2 Control | | | | |
| AR280 | RSS288L | RSS288L | | | | |
| AR281 | RSS288LC | RSS288LC | | | | |
| AR282 | Salivary Gland | Salivary Gland | | | | |
| AR283 | Skeletal Muscle | Skeletal Muscle | | | | |
| AR284 | Skeletal Muscle (91-01- | Skeletal Muscle (91-01- | | | | |
| | A105) | A105) | | | | |
| AR285 | Skeletal Muscle (42180) | Skeletal Muscle (42180) | | | | |
| AR286 | Skeletal Muscle (42386) | Skeletal Muscle (42386) | | | | |
| AR287 | Skeletal Muscle (42461) | Skeletal Muscle (42461) | | | | |
| AR288 | Skeletal Muscle (91-01- | Skeletal Muscle (91-01- | | | | |
| | A105) | A105) | | | | |
| AR289 | Skeletal Muscle (92-04- | Skeletal Muscle (92-04- | | | | |
| | A059) | A059) | | | | |
| AR290 | Skeletal Muscle (96-08- | Skeletal Muscle (96-08- | | | | |
| | A171) | A171) | | | | |
| AR291 | Skeletal Muscle (97-07- | Skeletal Muscle (97-07- | | | | |
| | A190A) | A190A) | | | | |
| AR292 | Skeletal Muscle Diabetic | Skeletal Muscle Diabetic | | | | |
| | (42352) | (42352) | | | | |
| AR293 | Skeletal Muscle Diabetic | Skeletal Muscle Diabetic | | | | |
| | (42366) | (42366) | | | | |
| AR294 | Skeletal Muscle Diabetic | Skeletal Muscle Diabetic | | | | |
| | (42395) | (42395) | | | | |
| AR295 | Skeletal Muscle Diabetic | Skeletal Muscle Diabetic | | | | |
| | (42483) | (42483) | | | | |
| AR296 | Skeletal Muscle Diabetic | Skeletal Muscle Diabetic | | | | |
| | (42491) | (42491) | | | | |
| AR297 | Skeletal Muscle Diabetic | Skeletal Muscle Diabetic | | | | |
| | 42352 | 42352 | | | | |
| AR298 | Skeletal Musle (42461) | Skeletal Musle (42461) | | | | |
| AR299 | Small Intestine | Small Intestine | | | | |
| AR300 | Stomach | Stomach | | | | |
| AR301 | T-Cell + HDPBQ71.fc | T-Cell + HDPBQ71.fc 1449 | | | | |
| | 1449 16 hrs | 16 hrs | | | | |
| AR302 | T-Cell + HDPBQ71.fc | T-Cell + HDPBQ71.fc 1449 | | | | |
| | 1449 6 hrs | 6 hrs | | | | |
| AR303 | T-Cell + IL2 16 hrs | T-Cell + IL2 16 hrs | | | | |
| AR304 | T-Cell + IL2 6 hrs | T-Cell + IL2 6 hrs | | | | |
| AR306 | T-Cell Untreated 16 hrs | T-Cell Untreated 16 hrs | | | | |
| AR307 | T-Cell Untreated 6 hrs | T-Cell Untreated 6 hrs | | | | |
| AR308 | T-Cells 24 hours | T-Cells 24 hours | | | | |
| AR309 | T-Cells 24 hrs | T-Cells 24 hrs | | | | |
| AR310 | T-Cells 24 hrs. | T-Cells 24 hrs. | | | | |
| AR311 | T-Cells 24 hrs | T-Cells 24 hrs | | | | |
| AR312 | T-Cells 4 days | T-Cells 4 days | | | | |
| AR313 | Thymus | Thymus | | | | |
| AR314 | TRE | TRE | | | | |
| AR315 | TREC | TREC | | | | |
| AR316 | Virtual Mixture | Virtual Mixture | | | | |
| AR317 | B lymphocyte, | B lymphocyte, | | | | |
| AR318 | (non-T; non-B) | (non-T; non-B) | | | | |
| AR326 | 001 - 293 RNA (Vector | 001 - 293 RNA (Vector | | | | |
| | Control) | Control) | | | | |
| AR327 | 001: Control | 001: Control | | | | |
| AR328 | 001: Control.1 | 001: Control.1 | | | | |
| AR355 | Acute Lymphocyte | Acute Lymphocyte Leukemia | | | | |
| | Leukemia | | | | | |
| AR356 | AML Patient #11 | AML Patient #11 | | | | |
| AR357 | AML Patient #2 | AML Patient #2 | | | | |
| AR358 | AML Patient #2 SGAH | AML Patient #2 SGAH | | | | |
| AR359 | AML Patient#2 | AML Patient#2 | | | | |
| AR360 | Aorta | Aorta | | | | |
| AR361 | B Cell | B Cell | | | | |
| AR362 | B lymphoblast | B lymphoblast | | | | |
| AR363 | B lymphocyte | B lymphocyte | | | | |
| AR364 | B lymphocytes | B lymphocytes | | | | |
| AR365 | B-cell | B-cell | | | | |
| AR366 | B-Cells | B-Cells | | | | |
| AR367 | B-Lymphoblast | B-Lymphoblast | | | | |
| AR368 | B-Lymphocytes | B-Lymphocytes | | | | |
| AR369 | Bladder | Bladder | | | | |
| AR370 | Bone Marrow | Bone Marrow | | | | |
| AR371 | Bronchial Epithelial Cell | Bronchial Epithelial Cell | | | | |
| AR372 | Bronchial Epithelial Cells | Bronchial Epithelial Cells | | | | |
| AR373 | Caco-2A | Caco-2A | | | | |
| AR374 | Caco-2B | Caco-2B | | | | |
| AR375 | Caco-2C | Caco-2C | | | | |
| AR376 | Cardiac #1 | Cardiac #1 | | | | |
| AR377 | Cardiac #2 | Cardiac #2 | | | | |
| AR378 | Chest Muscle | Chest Muscle | | | | |
| AR381 | Dendritic Cell | Dendritic Cell | | | | |
| AR382 | Dendritic cells | Dendritic cells | | | | |
| AR383 | E. coli | E. coli | | | | |
| AR384 | Epithelial Cells | Epithelial Cells | | | | |
| AR385 | Esophagus | Esophagus | | | | |
| AR386 | FPPS | FPPS | | | | |
| AR387 | FPPSC | FPPSC | | | | |
| AR388 | HepG2 Cell Line | HepG2 Cell Line | | | | |
| AR389 | HepG2 Cell line Buffer 1 hr. | HepG2 Cell line Buffer 1 hr. | | | | |
| AR390 | HepG2 Cell line Buffer 06 hr | HepG2 Cell line Buffer 06 hr | | | | |
| AR391 | HepG2 Cell line Buffer 24 hr. | HepG2 Cell line Buffer 24 hr. | | | | |
| AR392 | HepG2 Cell line Insulin 01 hr. | HepG2 Cell line Insulin 01 hr. | | | | |
| AR393 | HepG2 Cell line Insulin 06 hr. | HepG2 Cell line Insulin 06 hr. | | | | |
| AR394 | HepG2 Cell line Insulin 24 hr. | HepG2 Cell line Insulin 24 hr. | | | | |
| AR398 | HMC-1 | HMC-1 | | | | |
| AR399 | HMCS | HMCS | | | | |
| AR400 | HMSC | HMSC | | | | |
| AR401 | HUVEC #3 | HUVEC #3 | | | | |
| AR402 | HUVEC #4 | HUVEC #4 | | | | |
| AR404 | KIDNEY NORMAL | KIDNEY NORMAL | | | | |
| AR405 | KIDNEY TUMOR | KIDNEY TUMOR | | | | |
| AR406 | KIDNEY TUMOR | | | | | |
| AR407 | Lymph Node | Lymph Node | | | | |
| AR408 | Macrophage | Macrophage | | | | |
| AR409 | Megakarioblast | Megakarioblast | | | | |
| AR410 | Monocyte | Monocyte | | | | |
| AR411 | Monocytes | Monocytes | | | | |
| AR412 | Myocardium | Myocardium | | | | |
| AR413 | Myocardium #3 | Myocardium #3 | | | | |
| AR414 | Myocardium #4 | Myocardium #4 | | | | |
| AR415 | Myocardium #5 | Myocardium #5 | | | | |
| AR416 | NK | NK | | | | |
| AR417 | NK cell | NK cell | | | | |
| AR418 | NK cells | NK cells | | | | |
| AR419 | NKYa | NKYa | | | | |
| AR420 | NKYa019 | NKYa019 | | | | |
| AR421 | Ovary | Ovary | | | | |
| AR422 | Patient #11 | Patient #11 | | | | |
| AR423 | Peripheral blood | Peripheral blood | | | | |
| AR424 | Primary Adipocytes | Primary Adipocytes | | | | |
| AR425 | Promyeloblast | Promyeloblast | | | | |
| AR427 | RSSWT | RSSWT | | | | |
| AR428 | RSSWTC | RSSWTC | | | | |
| AR429 | SW 480(G1) | SW 480(G1) | | | | |
| AR430 | SW 480(G2) | SW 480(G2) | | | | |
| AR431 | SW 480(G3) | SW 480(G3) | | | | |
| AR432 | SW 480(G4) | SW 480(G4) | | | | |
| AR433 | SW 480(G5) | SW 480(G5) | | | | |
| AR434 | T Lymphoblast | T Lymphoblast | | | | |
| AR435 | T Lymphocyte | T Lymphocyte | | | | |
| AR436 | T-Cell | T-Cell | | | | |
| AR438 | T-Cell, | T-Cell, | | | | |
| AR439 | T-Cells | T-Cells | | | | |
| AR440 | T-lymphoblast | T-lymphoblast | | | | |
| AR441 | Th 1 | Th 1 | | | | |
| AR442 | Th 2 | Th 2 | | | | |
| AR443 | Th1 | Th1 | | | | |
| AR444 | Th2 | Th2 | | | | |
| H0002 | Human Adult Heart | Human Adult Heart | Heart | | | Uni-ZAP XR |
| H0004 | Human Adult Spleen | Human Adult Spleen | Spleen | | | Uni-ZAP XR |
| H0008 | Whole 6 Week Old | | | | | Uni-ZAP XR |
| | Embryo | | | | | |
| H0009 | Human Fetal Brain | | | | | Uni-ZAP XR |
| H0011 | Human Fetal Kidney | Human Fetal Kidney | Kidney | | | Uni-ZAP XR |
| H0012 | Human Fetal Kidney | Human Fetal Kidney | Kidney | | | Uni-ZAP XR |
| H0013 | Human 8 Week Whole | Human 8 Week Old Embryo | Embryo | | | Uni-ZAP XR |
| | Embryo | | | | | |
| H0014 | Human Gall Bladder | Human Gall Bladder | Gall Bladder | | | Uni-ZAP XR |
| H0015 | Human Gall Bladder, | Human Gall Bladder | Gall Bladder | | | Uni-ZAP XR |
| | fraction II | | | | | |
| H0022 | Jurkat Cells | Jurkat T-Cell Line | | | | Lambda ZAP II |
| H0024 | Human Fetal Lung III | Human Fetal Lung | Lung | | | Uni-ZAP XR |
| H0026 | Namalwa Cells | Namalwa B-Cell Line, EBV | | | | Lambda ZAP II |
| | | immortalized | | | | |
| H0028 | Human Old Ovary | Human Old Ovary | Ovary | | | pBluescript |
| H0030 | Human Placenta | | | | | Uni-ZAP XR |
| H0031 | Human Placenta | Human Placenta | Placenta | | | Uni-ZAP XR |
| H0032 | Human Prostate | Human Prostate | Prostate | | | Uni-ZAP XR |
| H0033 | Human Pituitary | Human Pituitary | | | | Uni-ZAP XR |
| H0036 | Human Adult Small | Human Adult Small Intestine | Small Int. | | | Uni-ZAP XR |
| | Intestine | | | | | |
| H0037 | Human Adult Small | Human Adult Small Intestine | Small Int. | | | pBluescript |
| | Intestine | | | | | |
| H0038 | Human Testes | Human Testes | Testis | | | Uni-ZAP XR |
| H0039 | Human Pancreas Tumor | Human Pancreas Tumor | Pancreas | | disease | Uni-ZAP XR |
| H0040 | Human Testes Tumor | Human Testes Tumor | Testis | | disease | Uni-ZAP XR |
| H0041 | Human Fetal Bone | Human Fetal Bone | Bone | | | Uni-ZAP XR |
| H0042 | Human Adult Pulmonary | Human Adult Pulmonary | Lung | | | Uni-ZAP XR |
| H0046 | Human Endometrial Tumor | Human Endometrial Tumor | Uterus | | disease | Uni-ZAP XR |
| H0049 | Human Fetal Kidney | Human Fetal Kidney | Kidney | | | Uni-ZAP XR |
| H0050 | Human Fetal Heart | Human Fetal Heart | Heart | | | Uni-ZAP XR |
| H0051 | Human Hippocampus | Human Hippocampus | Brain | | | Uni-ZAP XR |
| H0052 | Human Cerebellum | Human Cerebellum | Brain | | | Uni-ZAP XR |
| H0053 | Human Adult Kidney | Human Adult Kidney | Kidney | | | Uni-ZAP XR |
| H0056 | Human Umbilical Vein, | Human Umbilical Vein | Umbilical vein | | | Uni-ZAP XR |
| | Endo. remake | Endothelial Cells | | | | |
| H0057 | Human Fetal Spleen | | | | | Uni-ZAP XR |
| H0059 | Human Uterine Cancer | Human Uterine Cancer | Uterus | | disease | Lambda ZAP II |
| H0060 | Human Macrophage | Human Macrophage | Blood | Cell Line | | pBluescript |
| H0061 | Human Macrophage | Human Macrophage | Blood | Cell Line | | pBluescript |
| H0063 | Human Thymus | Human Thymus | Thymus | | | Uni-ZAP XR |
| H0068 | Human Skin Tumor | Human Skin Tumor | Skin | | disease | Uni-ZAP XR |
| H0069 | Human Activated T-Cells | Activated T-Cells | Blood | Cell Line | | Uni-ZAP XR |
| H0071 | Human Infant Adrenal | Human Infant Adrenal Gland | Adrenal gland | | | Uni-ZAP XR |
| | Gland | | | | | |
| H0075 | Human Activated T-Cells | Activated T-Cells | Blood | Cell Line | | Uni-ZAP XR |
| | (II) | | | | | |
| H0081 | Human Fetal Epithelium | Human Fetal Skin | Skin | | | Uni-ZAP XR |
| | (Skin) | | | | | |
| H0083 | HUMAN JURKAT | Jurkat Cells | | | | Uni-ZAP XR |
| | MEMBRANE BOUND | | | | | |
| | POLYSOMES | | | | | |
| H0085 | Human Colon | Human Colon | | | | Lambda ZAP II |
| H0086 | Human epithelioid sarcoma | Epithelioid Sarcoma, muscle | Sk Muscle | | disease | Uni-ZAP XR |
| H0087 | Human Thymus | Human Thymus | | | | pBluescript |
| H0090 | Human T-Cell Lymphoma | T-Cell Lymphoma | T-Cell | | disease | Uni-ZAP XR |
| H0095 | Human Greater Omentum, | Human Greater Omentum | peritoneum | | | Uni-ZAP XR |
| | RNA Remake | | | | | |
| H0099 | Human Lung Cancer, | Human Lung Cancer | Lung | | | pBluescript |
| | subtracted | | | | | |
| H0100 | Human Whole Six Week | Human Whole Six Week Old | Embryo | | | Uni-ZAP XR |
| | Old Embryo | Embryo | | | | |
| H0109 | Human Macrophage, | Macrophage | Blood | Cell Line | | pBluescript |
| | subtracted | | | | | |
| H0111 | Human Placenta, | Human Placenta | Placenta | | | pBluescript |
| | subtracted | | | | | |
| H0122 | Human Adult Skeletal | Human Skeletal Muscle | Sk Muscle | | | Uni-ZAP XR |
| | Muscle | | | | | |
| H0123 | Human Fetal Dura Mater | Human Fetal Dura Mater | Brain | | | Uni-ZAP XR |
| H0124 | Human | Human Rhabdomyosarcoma | Sk Muscle | | disease | Uni-ZAP XR |
| | Rhabdomyosarcoma | | | | | |
| H0125 | Cem cells cyclohexamide | Cyclohexamide Treated Cem, | Blood | Cell Line | | Uni-ZAP XR |
| | treated | Jurkat, Raji, and Supt | | | | |
| H0130 | LNCAP untreated | LNCAP Cell Line | Prostate | Cell Line | | Uni-ZAP XR |
| H0134 | Raji Cells, cyclohexamide | Cyclohexamide Treated Cem, | Blood | Cell Line | | Uni-ZAP XR |
| | treated | Jurkat, Raji, and Supt | | | | |
| H0135 | Human Synovial Sarcoma | Human Synovial Sarcoma | Synovium | | | Uni-ZAP XR |
| H0136 | Supt Cells, cyclohexamide | Cyclohexamide Treated Cem, | Blood | Cell Line | | Uni-ZAP XR |
| | treated | Jurkat, Raji, and Supt | | | | |
| H0140 | Activated T-Cells, 8 hrs. | Activated T-Cells | Blood | Cell Line | | Uni-ZAP XR |
| H0144 | Nine Week Old Early | 9 Wk Old Early Stage Human | Embryo | | | Uni-ZAP XR |
| | Stage Human | | | | | |
| H0150 | Human Epididymus | Epididymis | Testis | | | Uni-ZAP XR |
| H0151 | Early Stage Human Liver | Human Fetal Liver | Liver | | | Uni-ZAP XR |
| H0156 | Human Adrenal Gland | Human Adrenal Gland Tumor | Adrenal Gland | | disease | Uni-ZAP XR |
| | Tumor | | | | | |
| H0159 | Activated T-Cells, 8 hrs., | Activated T-Cells | Blood | Cell Line | | Uni-ZAP XR |
| | ligation 2 | | | | | |
| H0163 | Human Synovium | Human Synovium | Synovium | | | Uni-ZAP XR |
| H0166 | Human Prostate Cancer, | Human Prostate Cancer, stage | Prostate | | disease | Uni-ZAP XR |
| | Stage B2 fraction | B2 | | | | |
| H0169 | Human Prostate Cancer, | Human Prostate Cancer, | Prostate | | disease | Uni-ZAP XR |
| | Stage C fraction | stage C | | | | |
| H0170 | 12 Week Old Early Stage | Twelve Week Old Early | Embryo | | | Uni-ZAP XR |
| | Human | Stage Human | | | | |
| H0171 | 12 Week Old Early Stage | Twelve Week Old Early | Embryo | | | Uni-ZAP XR |
| | Human, II | Stage Human | | | | |
| H0172 | Human Fetal Brain, | Human Fetal Brain | Brain | | | Lambda ZAP II |
| | random primed | | | | | |
| H0178 | Human Fetal Brain | Human Fetal Brain | Brain | | | Uni-ZAP XR |
| H0179 | Human Neutrophil | Human Neutrophil | Blood | Cell Line | | Uni-ZAP XR |
| H0181 | Human Primary Breast | Human Primary Breast | Breast | | disease | Uni-ZAP XR |
| | Cancer | Cancer | | | | |
| H0188 | Human Normal Breast | Human Normal Breast | Breast | | | Uni-ZAP XR |
| H0194 | Human Cerebellum, | Human Cerebellum | Brain | | | pBluescript |
| | subtracted | | | | | |
| H0196 | Human Cardiomyopathy, | Human Cardiomyopathy | Heart | | | Uni-ZAP XR |
| | subtracted | | | | | |
| H0197 | Human Fetal Liver, | Human Fetal Liver | Liver | | | Uni-ZAP XR |
| | subtracted | | | | | |
| H0201 | Human Hippocampus, | Human Hippocampus | Brain | | | pBluescript |
| | subtracted | | | | | |
| H0208 | Early Stage Human Lung, | Human Fetal Lung | Lung | | | pBluescript |
| | subtracted | | | | | |
| H0212 | Human Prostate, subtracted | Human Prostate | Prostate | | | pBluescript |
| H0213 | Human Pituitary, | Human Pituitary | | | | Uni-ZAP XR |
| | subtracted | | | | | |
| H0216 | Supt cells, cyclohexamide | Cyclohexamide Treated Cem, | Blood | Cell Line | | pBluescript |
| | treated, subtracted | Jurkat, Raji, and Supt | | | | |
| H0220 | Activated T-Cells, 4 hrs, | Activated T-Cells | Blood | Cell Line | | Uni-ZAP XR |
| | subtracted | | | | | |
| H0231 | Human Colon, subtraction | Human Colon | | | | pBluescript |
| H0232 | Human Colon, differential | Human Colon | | | | pBluescript |
| | expression | | | | | |
| H0235 | Human colon cancer, | Human Colon Cancer, | Liver | | | pBluescript |
| | metaticized to liver, | metasticized to liver | | | | |
| | subtraction | | | | | |
| H0239 | Human Kidney Tumor | Human Kidney Tumor | Kidney | | disease | Uni-ZAP XR |
| H0241 | C7MCF7 cell line, estrogen | C7MCF7 Cell Line, estrogen | Breast | Cell Line | | Uni-ZAP XR |
| | treated, subtraction | treated | | | | |
| H0242 | Human Fetal Heart, | Human Fetal Heart | Heart | | | pBluescript |
| | Differential (Fetal- | | | | | |
| | Specific) | | | | | |
| H0244 | Human 8 Week Whole | Human 8 Week Old Embryo | Embryo | | | Uni-ZAP XR |
| | Embryo, subtracted | | | | | |
| H0250 | Human Activated | Human Monocytes | | | | Uni-ZAP XR |
| | Monocytes | | | | | |
| H0251 | Human Chondrosarcoma | Human Chondrosarcoma | Cartilage | | disease | Uni-ZAP XR |
| H0252 | Human Osteosarcoma | Human Osteosarcoma | Bone | | disease | Uni-ZAP XR |
| H0253 | Human adult testis, large | Human Adult Testis | Testis | | | Uni-ZAP XR |
| | inserts | | | | | |
| H0254 | Breast Lymph node cDNA | Breast Lymph Node | Lymph Node | | | Uni-ZAP XR |
| | library | | | | | |
| H0255 | breast lymph node CDNA | Breast Lymph Node | Lymph Node | | | Lambda ZAP II |
| | library | | | | | |
| H0257 | HL-60, PMA 4H | HL-60 Cells, PMA stimulated | Blood | Cell Line | | Uni-ZAP XR |
| | | 4H | | | | |
| H0261 | H. cerebellum, Enzyme | Human Cerebellum | Brain | | | Uni-ZAP XR |
| | subtracted | | | | | |
| H0263 | human colon cancer | Human Colon Cancer | Colon | | disease | Lambda ZAP II |
| H0264 | human tonsils | Human Tonsil | Tonsil | | | Uni-ZAP XR |
| H0265 | Activated T-Cell | T-Cells | Blood | Cell Line | | Uni-ZAP XR |
| | (12 hs)/Thiouridine | | | | | |
| | labelledEco | | | | | |
| H0266 | Human Microvascular | HMEC | Vein | Cell Line | | Lambda ZAP II |
| | Endothelial Cells, fract. A | | | | | |
| H0268 | Human Umbilical Vein | HUVE Cells | Umbilical vein | Cell Line | | Lambda ZAP II |
| | Endothelial Cells, fract. A | | | | | |
| H0270 | HPAS (human pancreas, | Human Pancreas | Pancreas | | | Uni-ZAP XR |
| | subtracted) | | | | | |
| H0271 | Human Neutrophil, | Human Neutrophil - | Blood | Cell Line | | Uni-ZAP XR |
| | Activated | Activated | | | | |
| H0272 | HUMAN TONSILS, | Human Tonsil | Tonsil | | | Uni-ZAP XR |
| | FRACTION 2 | | | | | |
| H0279 | K562 cells | K562 Cell line | cell line | Cell Line | | ZAP Express |
| H0280 | K562 + PMA (36 hrs) | K562 Cell line | cell line | Cell Line | | ZAP Express |
| H0284 | Human OB MG63 control | Human Osteoblastoma MG63 | Bone | Cell Line | | Uni-ZAP XR |
| | fraction I | cell line | | | | |
| H0286 | Human OB MG63 treated | Human Osteoblastoma MG63 | Bone | Cell Line | | Uni-ZAP XR |
| | (10 nM E2) fraction I | cell line | | | | |
| H0288 | Human OB HOS control | Human Osteoblastoma HOS | Bone | Cell Line | | Uni-ZAP XR |
| | fraction I | cell line | | | | |
| H0292 | Human OB HOS treated | Human Osteoblastoma HOS | Bone | Cell Line | | Uni-ZAP XR |
| | (10 nM E2) fraction I | cell line | | | | |
| H0293 | WI 38 cells | | | | | Uni-ZAP XR |
| H0294 | Amniotic Cells - TNF | Amniotic Cells - TNF | Placenta | Cell Line | | Uni-ZAP XR |
| | induced | induced | | | | |
| H0295 | Amniotic Cells - Primary | Amniotic Cells - Primary | Placenta | Cell Line | | Uni-ZAP XR |
| | Culture | Culture | | | | |
| H0305 | CD34 positive cells (Cord | CD34 Positive Cells | Cord Blood | | | ZAP Express |
| | Blood) | | | | | |
| H0306 | CD34 depleted Buffy Coat | CD34 Depleted Buffy Coat | Cord Blood | | | ZAP Express |
| | (Cord Blood) | (Cord Blood) | | | | |
| H0309 | Human Chronic Synovitis | Synovium, Chronic | Synovium | | disease | Uni-ZAP XR |
| | | Synovitis/Osteoarthritis | | | | |
| H0310 | human caudate nucleus | Brain | Brain | | | Uni-ZAP XR |
| H0316 | HUMAN STOMACH | Human Stomach | Stomach | | | Uni-ZAP XR |
| H0318 | HUMAN B CELL | Human B Cell Lymphoma | Lymph Node | | disease | Uni-ZAP XR |
| | LYMPHOMA | | | | | |
| H0327 | human corpus colosum | Human Corpus Callosum | Brain | | | Uni-ZAP XR |
| H0328 | human ovarian cancer | Ovarian Cancer | Ovary | | disease | Uni-ZAP XR |
| H0329 | Dermatofibrosarcoma | Dermatofibrosarcoma | Skin | | disease | Uni-ZAP XR |
| | Protuberance | Protuberans | | | | |
| H0331 | Hepatocellular Tumor | Hepatocellular Tumor | Liver | | disease | Lambda ZAP II |
| H0333 | Hemangiopericytoma | Hemangiopericytoma | Blood vessel | | disease | Lambda ZAP II |
| H0334 | Kidney cancer | Kidney Cancer | Kidney | | disease | Uni-ZAP XR |
| H0339 | Duodenum | Duodenum | | | | Uni-ZAP XR |
| H0341 | Bone Marrow Cell Line | Bone Marrow Cell Line | Bone Marrow | Cell Line | | Uni-ZAP XR |
| | (RS4; 11) | RS4; 11 | | | | |
| H0345 | SKIN | Skin - 4000868H | Skin | | | Uni-ZAP XR |
| H0351 | Glioblastoma | Glioblastoma | Brain | | disease | Uni-ZAP XR |
| H0352 | wilm''s tumor | Wilm''s Tumor | | | disease | Uni-ZAP XR |
| H0354 | Human Leukocytes | Human Leukocytes | Blood | Cell Line | | pCMVSport 1 |
| H0355 | Human Liver | Human Liver, normal Adult | | | | pCMVSport 1 |
| H0356 | Human Kidney | Human Kidney | Kidney | | | pCMVSport 1 |
| H0357 | H. Normalized Fetal Liver, | Human Fetal Liver | Liver | | | Uni-ZAP XR |
| | II | | | | | |
| H0362 | HeLa cell line | HELA CELL LINE | | | | pSport1 |
| H0366 | L428 cell line | L428 | | | | ZAP Express |
| H0369 | H. Atrophic Endometrium | Atrophic Endometrium and | | | | Uni-ZAP XR |
| | | myometrium | | | | |
| H0370 | H. Lymph node breast | Lymph node with Met. Breast | | | disease | Uni-ZAP XR |
| | Cancer | Cancer | | | | |
| H0373 | Human Heart | Human Adult Heart | Heart | | | pCMVSport 1 |
| H0374 | Human Brain | Human Brain | | | | pCMVSport 1 |
| H0375 | Human Lung | Human Lung | | | | pCMVSport 1 |
| H0379 | Human Tongue, frac 1 | Human Tongue | | | | pSport1 |
| H0380 | Human Tongue, frac 2 | Human Tongue | | | | pSport1 |
| H0383 | Human Prostate BPH, re- | Human Prostate BPH | | | | Uni-ZAP XR |
| | excision | | | | | |
| H0388 | Human Rejected Kidney, | Human Rejected Kidney | | | disease | pBluescript |
| | 704 re-excision | | | | | |
| H0390 | Human Amygdala | Human Amygdala Depression | | | disease | pBluescript |
| | Depression, re-excision | | | | | |
| H0391 | H. Meniingima, M6 | Human Meningima | brain | | | pSport1 |
| H0392 | H. Meningima, M1 | Human Meningima | brain | | | pSport1 |
| H0393 | Fetal Liver, subtraction II | Human Fetal Liver | Liver | | | pBluescript |
| H0395 | A1-CELL LINE | Redd-Sternberg cell | | | | ZAP Express |
| H0402 | CD34 depleted Buffy Coat | CD34 Depleted Buffy Coat | Cord Blood | | | ZAP Express |
| | (Cord Blood), re-excision | (Cord Blood) | | | | |
| H0406 | H Amygdala Depression, | Human Amygdala Depression | | | | Uni-ZAP XR |
| | subtracted | | | | | |
| H0411 | H Female Bladder, Adult | Human Female Adult Bladder | Bladder | | | pSport1 |
| H0412 | Human umbilical vein | HUVE Cells | Umbilical vein | Cell Line | | pSport1 |
| | endothelial cells, IL-4 | | | | | |
| | induced | | | | | |
| H0413 | Human Umbilical Vein | HUVE Cells | Umbilical vein | Cell Line | | pSport1 |
| | Endothelial Cells, | | | | | |
| | uninduced | | | | | |
| H0415 | H. Ovarian Tumor, II, | Ovarian Tumor, OV5232 | Ovary | | disease | pCMVSport |
| | OV5232 | | | | | 2.0 |
| H0416 | Human Neutrophils, | Human Neutrophil - | Blood | Cell Line | | pBluescript |
| | Activated, re-excision | Activated | | | | |
| H0417 | Human Pituitary, | Human Pituitary | | | | pBluescript |
| | subtracted VIII | | | | | |
| H0419 | Bone Cancer, re-excision | Bone Cancer | | | | Uni-ZAP XR |
| H0421 | Human Bone Marrow, re- | Bone Marrow | | | | pBluescript |
| | excision | | | | | |
| H0422 | T-Cell PHA 16 hrs | T-Cells | Blood | Cell Line | | pSport1 |
| H0423 | T-Cell PHA 24 hrs | T-Cells | Blood | Cell Line | | pSport1 |
| H0424 | Human Pituitary, subt IX | Human Pituitary | | | | pBluescript |
| H0427 | Human Adipose | Human Adipose, left | | | | pSport1 |
| | | hiplipoma | | | | |
| H0428 | Human Ovary | Human Ovary Tumor | Ovary | | | pSport1 |
| H0429 | K562 + PMA (36 hrs), re- | K562 Cell line | cell line | Cell Line | | ZAP Express |
| | excision | | | | | |
| H0431 | H. Kidney Medulla, re- | Kidney medulla | Kidney | | | pBluescript |
| | excision | | | | | |
| H0433 | Human Umbilical Vein | HUVE Cells | Umbilical vein | Cell Line | | pBluescript |
| | Endothelial cells, frac B, | | | | | |
| | re-excision | | | | | |
| H0435 | Ovarian Tumor 10-3-95 | Ovarian Tumor, OV350721 | Ovary | | | pCMVSport |
| | | | | | | 2.0 |
| H0436 | Resting T-Cell Library, II | T-Cells | Blood | Cell Line | | pSport1 |
| H0437 | H Umbilical Vein | HUVE Cells | Umbilical vein | Cell Line | | Lambda ZAP II |
| | Endothelial Cells, frac A, | | | | | |
| | re-excision | | | | | |
| H0438 | H. Whole Brain #2, re- | Human Whole Brain #2 | | | | ZAP Express |
| | excision | | | | | |
| H0439 | Human Eosinophils | Eosinophils | | | | pBluescript |
| H0441 | H. Kidney Cortex, | Kidney cortex | Kidney | | | pBluescript |
| | subtracted | | | | | |
| H0443 | H. Adipose, subtracted | Human Adipose, left | | | | pSport1 |
| | | hiplipoma | | | | |
| H0444 | Spleen metastic melanoma | Spleen, Metastic malignant | Spleen | | disease | pSport1 |
| | | melanoma | | | | |
| H0445 | Spleen, Chronic | Human Spleen, CLL | Spleen | | disease | pSport1 |
| | lymphocytic leukemia | | | | | |
| H0450 | CD34+cells, II | CD34 positive cells | | | | pCMVSport |
| | | | | | | 2.0 |
| H0455 | H. Striatum Depression, | Human Brain, Striatum | Brain | | | pBluescript |
| | subt | Depression | | | | |
| H0457 | Human Eosinophils | Human Eosinophils | | | | pSport1 |
| H0477 | Human Tonsil, Lib 3 | Human Tonsil | Tonsil | | | pSport1 |
| H0478 | Salivary Gland, Lib 2 | Human Salivary Gland | Salivary gland | | | pSport1 |
| H0479 | Salivary Gland, Lib 3 | Human Salivary Gland | Salivary gland | | | pSport1 |
| H0483 | Breast Cancer cell line, | Breast Cancer Cell line, | | | | pSport1 |
| | MDA 36 | MDA 36 | | | | |
| H0484 | Breast Cancer Cell line, | Breast Cancer Cell line, | | | | pSport1 |
| | angiogenic | Angiogenic, 36T3 | | | | |
| H0486 | Hodgkin''s Lymphoma II | Hodgkin''s Lymphoma II | | | disease | pCMVSport |
| | | | | | | 2.0 |
| H0487 | Human Tonsils, lib I | Human Tonsils | | | | pCMVSport |
| | | | | | | 2.0 |
| H0488 | Human Tonsils, Lib 2 | Human Tonsils | | | | pCMVSport |
| | | | | | | 2.0 |
| H0492 | HL-60, RA 4h, Subtracted | HL-60 Cells, RA stimulated | Blood | Cell Line | | Uni-ZAP XR |
| | | for 4H | | | | |
| H0494 | Keratinocyte | Keratinocyte | | | | pCMVSport |
| | | | | | | 2.0 |
| H0497 | HEL cell line | HEL cell line | | HEL 92.1.7 | | pSport1 |
| H0505 | Human Astrocyte | Human Astrocyte | | | | pSport1 |
| H0506 | Ulcerative Colitis | Colon | Colon | | | pSport1 |
| H0509 | Liver, Hepatoma | Human Liver, Hepatoma, | Liver | | disease | pCMVSport |
| | | patient 8 | | | | 3.0 |
| H0510 | Human Liver, normal | Human Liver, normal, Patient | Liver | | | pCMVSport |
| | | # 8 | | | | 3.0 |
| H0518 | pBMC stimulated w/ poly | pBMC stimulated with poly | | | | pCMVSport |
| | I/C | I/C | | | | 3.0 |
| H0519 | NTERA2, control | NTERA2, Teratocarcinoma | | | | pCMVSport |
| | | cell line | | | | 3.0 |
| H0520 | NTERA2 + retinoic acid, | NTERA2, Teratocarcinoma | | | | pSport1 |
| | 14 days | cell line | | | | |
| H0521 | Primary Dendritic Cells, lib 1 | Primary Dendritic cells | | | | pCMVSport |
| | | | | | | 3.0 |
| H0522 | Primary Dendritic | Primary Dendritic cells | | | | pCMVSport |
| | | | | | | 3.0 |
| | cells, frac 2 | | | | | |
| H0525 | PCR, pBMC I/C treated | pBMC stimulated with poly | | | | PCRII |
| | | I/C | | | | |
| H0528 | Poly[I]/Poly[C] Normal | Poly[I]/Poly[C] Normal Lung | | | | pCMVSport |
| | | | | | | 3.0 |
| | Lung Fibroblasts | Fibroblasts | | | | |
| H0529 | Myoloid Progenitor Cell | TF-1 Cell Line; Myoloid | | | | pCMVSport |
| | Line | progenitor cell line | | | | 3.0 |
| H0538 | Merkel Cells | Merkel cells | Lymph node | | | pSport1 |
| H0539 | Pancreas Islet Cell Tumor | Pancreas Islet Cell Tumour | Pancreas | | disease | pSport1 |
| H0542 | T Cell helper I | Helper T cell | | | | pCMVSport |
| | | | | | | 3.0 |
| H0543 | T cell helper II | Helper T cell | | | | pCMVSport |
| | | | | | | 3.0 |
| H0544 | Human endometrial | Human endometrial stromal | | | | pCMVSport |
| | | | | | | 3.0 |
| | stromal cells | cells | | | | |
| H0545 | Human endometrial | Human endometrial stromal | | | | pCMVSport |
| | | | | | | 3.0 |
| | stromal cells-treated with | cells-treated with proge | | | | |
| | progesterone | | | | | |
| H0546 | Human endometrial | Human endometrial stromal | | | | pCMVSport |
| | stromal cells-treated with | cells-treated with estra | | | | 3.0 |
| | estradiol | | | | | |
| H0547 | NTERA2 teratocarcinoma | NTERA2, Teratocarcinoma | | | | pSport1 |
| | cell line + retinoic acid (14 | cell line | | | | |
| | days) | | | | | |
| H0549 | H. Epididiymus, caput & | Human Epididiymus, caput | | | | Uni-ZAP XR |
| | corpus | and corpus | | | | |
| H0550 | H. Epididiymus, cauda | Human Epididiymus, cauda | | | | Uni-ZAP XR |
| H0551 | Human Thymus Stromal | Human Thymus Stromal | | | | pCMVSport |
| | Cells | Cells | | | | 3.0 |
| H0553 | Human Placenta | Human Placenta | | | | pCMVSport |
| | | | | | | 3.0 |
| H0555 | Rejected Kidney, lib 4 | Human Rejected Kidney | Kidney | | disease | pCMVSport |
| | | | | | | 3.0 |
| H0556 | Activated T- | T-Cells | Blood | Cell Line | | Uni-ZAP XR |
| | cell(12 h)/Thiouridine-re- | | | | | |
| | excision | | | | | |
| H0559 | HL-60, PMA 4H, re- | HL-60 Cells, PMA stimulated | Blood | Cell Line | | Uni-ZAP XR |
| | excision | 4H | | | | |
| H0560 | KMH2 | KMH2 | | | | pCMVSport |
| | | | | | | 3.0 |
| H0561 | L428 | L428 | | | | pCMVSport |
| | | | | | | 3.0 |
| H0563 | Human Fetal Brain, | Human Fetal Brain | | | | pCMVSport |
| | normalized 50021F | | | | | 2.0 |
| H0564 | Human Fetal Brain, | Human Fetal Brain | | | | pCMVSport |
| | normalized C5001F | | | | | 2.0 |
| H0566 | Human Fetal | Human Fetal Brain | | | | pCMVSport |
| | Brain, normalized c50F | | | | | 2.0 |
| H0569 | Human Fetal Brain, | Human Fetal Brain | | | | pCMVSport |
| | normalized CO | | | | | 2.0 |
| H0570 | Human Fetal Brain, | Human Fetal Brain | | | | pCMVSport |
| | normalized C500H | | | | | 2.0 |
| H0571 | Human Fetal Brain, | Human Fetal Brain | | | | pCMVSport |
| | normalized C500HE | | | | | 2.0 |
| H0572 | Human Fetal Brain, | Human Fetal Brain | | | | pCMVSport |
| | normalized AC5002 | | | | | 2.0 |
| H0574 | Hepatocellular Tumor; re- | Hepatocellular Tumor | Liver | | disease | Lambda ZAP II |
| | excision | | | | | |
| H0575 | Human Adult | Human Adult Pulmonary | Lung | | | Uni-ZAP XR |
| | Pulmonary; re-excision | | | | | |
| H0576 | Resting T-Cell; re-excision | T-Cells | Blood | Cell Line | | Lambda ZAP II |
| H0580 | Dendritic cells, pooled | Pooled dendritic cells | | | | pCMVSport |
| | | | | | | 3.0 |
| H0581 | Human Bone Marrow, | Human Bone Marrow | Bone Marrow | | | pCMVSport |
| | | | | | | 3.0 |
| | treated | | | | | |
| H0583 | B Cell lymphoma | B Cell Lymphoma | B Cell | | disease | pCMVSport |
| | | | | | | 3.0 |
| H0585 | Activated T-Cells, 12 hrs, | Activated T-Cells | Blood | Cell Line | | Uni-ZAP XR |
| | re-excision | | | | | |
| H0586 | Healing groin wound, 6.5 | healing groin wound, 6.5 | groin | | disease | pCMVSport |
| | hours post incision | hours post incision - 2/ | | | | 3.0 |
| H0587 | Healing groin wound; 7.5 | Groin-Feb. 19, 1997 | groin | | disease | pCMVSport |
| | hours post incision | | | | | 3.0 |
| H0589 | CD34 positive cells (cord | CD34 Positive Cells | Cord Blood | | | ZAP Express |
| | blood), re-ex | | | | | |
| H0590 | Human adult small | Human Adult Small Intestine | Small Int. | | | Uni-ZAP XR |
| | intestine, re-excision | | | | | |
| H0591 | Human T-cell | T-Cell Lymphoma | T-Cell | | disease | Uni-ZAP XR |
| | lymphoma; re-excision | | | | | |
| H0592 | Healing groin wound - zero | HGS wound healing project; | | | disease | pCMVSport |
| | hr post-incision (control) | abdomen | | | | 3.0 |
| H0593 | Olfactory | Olfactory epithelium from | | | | pCMVSport |
| | epithelium; nasalcavity | roof of left nasal cacit | | | | 3.0 |
| H0594 | Human Lung Cancer; re- | Human Lung Cancer | Lung | | disease | Lambda ZAP II |
| | excision | | | | | |
| H0595 | Stomach cancer | Stomach Cancer - 5383A | | | disease | Uni-ZAP XR |
| | (human); re-excision | (human) | | | | |
| H0596 | Human Colon Cancer; re- | Human Colon Cancer | Colon | | | Lambda ZAP II |
| | excision | | | | | |
| H0597 | Human Colon; re-excision | Human Colon | | | | Lambda ZAP II |
| H0598 | Human Stomach; re- | Human Stomach | Stomach | | | Uni-ZAP XR |
| | excision | | | | | |
| H0599 | Human Adult Heart; re- | Human Adult Heart | Heart | | | Uni-ZAP XR |
| | excision | | | | | |
| H0600 | Healing Abdomen | Abdomen | | | disease | pCMVSport |
| | wound; 70&90 min post | | | | | 3.0 |
| | incision | | | | | |
| H0602 | Healing Abdomen | Abdomen | | | disease | pCMVSport |
| | Wound; 21&29 days post | | | | | 3.0 |
| | incision | | | | | |
| H0604 | Human Pituitary, re- | Human Pituitary | | | | pBluescript |
| | excision | | | | | |
| H0606 | Human Primary Breast | Human Primary Breast | Breast | | disease | Uni-ZAP XR |
| | Cancer; re-excision | Cancer | | | | |
| H0609 | H. Leukocytes, normalized | H. Leukocytes | | | | pCMVSport 1 |
| | cot >500 A | | | | | |
| H0615 | Human Ovarian Cancer | Ovarian Cancer | Ovary | | disease | Uni-ZAP XR |
| | Reexcision | | | | | |
| H0616 | Human Testes, Reexcision | Human Testes | Testis | | | Uni-ZAP XR |
| H0617 | Human Primary Breast | Human Primary Breast | Breast | | disease | Uni-ZAP XR |
| | Cancer Reexcision | Cancer | | | | |
| H0618 | Human Adult Testes, Large | Human Adult Testis | Testis | | | Uni-ZAP XR |
| | Inserts, Reexcision | | | | | |
| H0619 | Fetal Heart | Human Fetal Heart | Heart | | | Uni-ZAP XR |
| H0620 | Human Fetal Kidney; | Human Fetal Kidney | Kidney | | | Uni-ZAP XR |
| | Reexcision | | | | | |
| H0622 | Human Pancreas Tumor; | Human Pancreas Tumor | Pancreas | | disease | Uni-ZAP XR |
| | Reexcision | | | | | |
| H0623 | Human Umbilical Vein; | Human Umbilical Vein | Umbilical vein | | | Uni-ZAP XR |
| | Reexcision | Endothelial Cells | | | | |
| H0624 | 12 Week Early Stage | Twelve Week Old Early | Embryo | | | Uni-ZAP XR |
| | Human II; Reexcision | Stage Human | | | | |
| H0625 | Ku 812F Basophils Line | Ku 812F Basophils | | | | pSport1 |
| H0627 | Saos2 Cells; Vitamin D3 | Saos2 Cell Line; Vitamin D3 | | | | pSport1 |
| | Treated | Treated | | | | |
| H0628 | Human Pre-Differentiated | Human Pre-Differentiated | | | | Uni-ZAP XR |
| | Adipocytes | Adipocytes | | | | |
| H0631 | Saos2, Dexamethosome | Saos2 Cell Line; | | | | pSport1 |
| | Treated | Dexamethosome Treated | | | | |
| H0632 | Hepatocellular Tumor; re- | Hepatocellular Tumor | Liver | | | Lambda ZAP II |
| | excision | | | | | |
| H0633 | Lung Carcinoma A549 | TNFalpha activated A549- | | | disease | pSport1 |
| | TNFalpha activated | Lung Carcinoma | | | | |
| H0634 | Human Testes Tumor, re- | Human Testes Tumor | Testis | | disease | Uni-ZAP XR |
| | excision | | | | | |
| H0635 | Human Activated T-Cells, | Activated T-Cells | Blood | Cell Line | | Uni-ZAP XR |
| | re-excision | | | | | |
| H0637 | Dendritic Cells From | Dentritic cells from CD34 | | | | pSport1 |
| | CD34 Cells | cells | | | | |
| H0638 | CD40 activated monocyte | CD40 activated monocyte | | | | pSport1 |
| | dendridic cells | dendridic cells | | | | |
| H0640 | Ficolled Human Stromal | Ficolled Human Stromal | | | | Other |
| | Cells, Untreated | Cells, Untreated | | | | |
| H0641 | LPS activated derived | LPS activated monocyte | | | | pSport1 |
| | dendritic cells | derived dendritic cells | | | | |
| H0642 | Hep G2 Cells, lambda | Hep G2 Cells | | | | Other |
| | library | | | | | |
| H0643 | Hep G2 Cells, PCR library | Hep G2 Cells | | | | Other |
| H0644 | Human Placenta (re- | Human Placenta | Placenta | | | Uni-ZAP XR |
| | excision) | | | | | |
| H0645 | Fetal Heart, re-excision | Human Fetal Heart | Heart | | | Uni-ZAP XR |
| H0646 | Lung, Cancer (4005313A3): | Metastatic squamous cell | | | | pSport1 |
| | Invasive Poorly | lung carcinoma, poorly di | | | | |
| | Differentiated Lung | | | | | |
| | Adenocarcinoma, | | | | | |
| H0647 | Lung, Cancer (4005163B7): | Invasive poorly differentiated | | | disease | pSport1 |
| | Invasive, Poorly Diff. | lung adenocarcinoma | | | | |
| | Adenocarcinoma, | | | | | |
| | Metastatic | | | | | |
| H0648 | Ovary, Cancer: (4004562B6) | Papillary Cstic neoplasm of | | | disease | pSport1 |
| | Papillary Serous | low malignant potentia | | | | |
| | Cystic Neoplasm, Low | | | | | |
| | Malignant Pot | | | | | |
| H0649 | Lung, Normal: (4005313B1) | Normal Lung | | | | pSport1 |
| H0650 | B-Cells | B-Cells | | | | pCMVSport |
| | | | | | | 3.0 |
| H0651 | Ovary, Normal: | Normal Ovary | | | | pSport1 |
| | (9805C040R) | | | | | |
| H0652 | Lung, Normal: (4005313B1) | Normal Lung | | | | pSport1 |
| H0653 | Stromal Cells | Stromal Cells | | | | pSport1 |
| H0656 | B-cells (unstimulated) | B-cells (unstimulated) | | | | pSport1 |
| H0657 | B-cells (stimulated) | B-cells (stimulated) | | | | pSport1 |
| H0658 | Ovary, Cancer | 9809C332- Poorly | Ovary & | | disease | pSport1 |
| | (9809C332): Poorly | differentiate | Fallopian Tubes | | | |
| | differentiated | | | | | |
| | adenocarcinoma | | | | | |
| H0659 | Ovary, Cancer | Grade II Papillary Carcinoma, | Ovary | | disease | pSport1 |
| | (15395A1F): Grade II | Ovary | | | | |
| | Papillary Carcinoma | | | | | |
| H0660 | Ovary, Cancer: | Poorly differentiated | | | disease | pSport1 |
| | (15799A1F) Poorly | carcinoma, ovary | | | | |
| | differentiated carcinoma | | | | | |
| H0661 | Breast, Cancer: (4004943A5) | Breast cancer | | | disease | pSport1 |
| H0662 | Breast, Normal: | Normal Breast - | Breast | | | pSport1 |
| | (4005522B2) | #4005522(B2) | | | | |
| H0663 | Breast, Cancer: (4005522A2) | Breast Cancer - | Breast | | disease | pSport1 |
| | | #4005522(A2) | | | | |
| H0664 | Breast, Cancer: | Breast Cancer | Breast | | disease | pSport1 |
| | (9806C012R) | | | | | |
| H0665 | Stromal cells 3.88 | Stromal cells 3.88 | | | | pSport1 |
| H0666 | Ovary, Cancer: (4004332A2) | Ovarian Cancer, Sample | | | disease | pSport1 |
| | | #4004332A2 | | | | |
| H0667 | Stromal cells(HBM3.18) | Stromal cell(HBM 3.18) | | | | pSport1 |
| H0668 | stromal cell clone 2.5 | stromal cell clone 2.5 | | | | pSport1 |
| H0670 | Ovary, Cancer(4004650A3): | Ovarian Cancer - 4004650A3 | | | | pSport1 |
| | Well-Differentiated | | | | | |
| | Micropapillary Serous | | | | | |
| | Carcinoma | | | | | |
| H0671 | Breast, Cancer: | Breast Cancer- Sample # | | | | pSport1 |
| | (9802C02OE) | 9802C02OE | | | | |
| H0672 | Ovary, Cancer: (4004576A8): | Ovarian Cancer(4004576A8) | Ovary | | | pSport1 |
| H0673 | Human Prostate Cancer, | Human Prostate Cancer, stage | Prostate | | | Uni-ZAP XR |
| | Stage B2; re-excision | B2 | | | | |
| H0674 | Human Prostate Cancer, | Human Prostate Cancer, | Prostate | | | Uni-ZAP XR |
| | Stage C; re-excission | stage C | | | | |
| H0675 | Colon, Cancer: | Colon Cancer 9808C064R | | | | pCMVSport |
| | (9808C064R) | | | | | 3.0 |
| H0676 | Colon, Cancer: | Colon Cancer 9808C064R | | | | pCMVSport |
| | (9808C064R)-total RNA | | | | | 3.0 |
| H0677 | TNFR degenerate oligo | B-Cells | | | | PCRII |
| H0682 | Serous Papillary | serous papillary | | | | pCMVSport |
| | Adenocarcinoma | adenocarcinoma | | | | 3.0 |
| | | (9606G304SPA3B) | | | | |
| H0683 | Ovarian Serous Papillary | Serous papillary | | | | pCMVSport |
| | Adenocarcinoma | adenocarcinoma, stage 3C | | | | 3.0 |
| | | (9804G01 | | | | |
| H0684 | Serous Papillary | Ovarian Cancer- 9810G606 | Ovaries | | | pCMVSport |
| | Adenocarcinoma | | | | | 3.0 |
| H0685 | Adenocarcinoma of Ovary, | Adenocarcinoma of Ovary, | | | | pCMVSport |
| | Human Cell Line, # | Human Cell Line, # OVCAR- | | | | 3.0 |
| | OVCAR-3 | | | | | |
| H0686 | Adenocarcinoma of Ovary, | Adenocarcinoma of Ovary, | | | | pCMVSport |
| | Human Cell Line | Human Cell Line, # SW-626 | | | | 3.0 |
| H0687 | Human normal | Human normal | Ovary | | | pCMVSport |
| | ovary(#9610G215) | ovary(#9610G215) | | | | 3.0 |
| H0688 | Human Ovarian | Human Ovarian | | | | pCMVSport |
| | Cancer(#9807G017) | cancer(#9807G017), mRNA | | | | 3.0 |
| | | from Maura Ru | | | | |
| H0689 | Ovarian Cancer | Ovarian Cancer, #9806G019 | | | | pCMVSport |
| | | | | | | 3.0 |
| H0692 | BLyS Receptor from | B Cell Lymphoma | B Cell | | | pCMVSport |
| | Expression Cloning | | | | | 3.0 |
| H0693 | Normal Prostate | Normal Prostate Tissue # | | | | pCMVSport |
| | #ODQ3958EN | ODQ3958EN | | | | 3.0 |
| H0694 | Prostate gland | Prostate gland, | prostate gland | | | pCMVSport |
| | adenocarcinoma | adenocarcinoma, mod/diff, | | | | 3.0 |
| | | gleason | | | | |
| N0006 | Human Fetal Brain | Human Fetal Brain | | | | |
| S0001 | Brain frontal cortex | Brain frontal cortex | Brain | | | Lambda ZAP II |
| S0002 | Monocyte activated | Monocyte-activated | blood | Cell Line | | Uni-ZAP XR |
| S0003 | Human Osteoclastoma | Osteoclastoma | bone | | disease | Uni-ZAP XR |
| S0004 | Prostate | Prostate BPH | Prostate | | | Lambda ZAP II |
| S0006 | Neuroblastoma | Human Neural Blastoma | | | disease | pCDNA |
| S0007 | Early Stage Human Brain | Human Fetal Brain | | | | Uni-ZAP XR |
| S0010 | Human Amygdala | Amygdala | | | | Uni-ZAP XR |
| S0011 | STROMAL - | Osteoclastoma | bone | | disease | Uni-ZAP XR |
| | OSTEOCLASTOMA | | | | | |
| S0013 | Prostate | Prostate | prostate | | | Uni-ZAP XR |
| S0016 | Kidney Pyramids | Kidney pyramids | Kidney | | | Uni-ZAP XR |
| S0022 | Human Osteoclastoma | Osteoclastoma Stromal Cells | | | | Uni-ZAP XR |
| | Stromal Cells - | | | | | |
| | unamplified | | | | | |
| S0024 | Human Kidney Medulla - | Human Kidney Medulla | | | | |
| | unamplified | | | | | |
| S0026 | Stromal cell TF274 | stromal cell | Bone marrow | Cell Line | | Uni-ZAP XR |
| S0027 | Smooth muscle, serum | Smooth muscle | Pulmanary | Cell Line | | Uni-ZAP XR |
| | treated | | artery | | | |
| S0028 | Smooth muscle, control | Smooth muscle | Pulmanary | Cell Line | | Uni-ZAP XR |
| | | | artery | | | |
| S0029 | brain stem | Brain stem | brain | | | Uni-ZAP XR |
| S0031 | Spinal cord | Spinal cord | spinal cord | | | Uni-ZAP XR |
| S0032 | Smooth muscle-ILb | Smooth muscle | Pulmanary | Cell Line | | Uni-ZAP XR |
| | induced | | artery | | | |
| S0036 | Human Substantia Nigra | Human Substantia Nigra | | | | Uni-ZAP XR |
| S0037 | Smooth muscle, IL1b | Smooth muscle | Pulmanary | Cell Line | | Uni-ZAP XR |
| | induced | | artery | | | |
| S0038 | Human Whole Brain #2 - | Human Whole Brain #2 | | | | ZAP Express |
| | Oligo dT >1.5 Kb | | | | | |
| S0039 | Hypothalamus | Hypothalamus | Brain | | | Uni-ZAP XR |
| S0040 | Adipocytes | Human Adipocytes from | | | | Uni-ZAP XR |
| | | Osteoclastoma | | | | |
| S0042 | Testes | Human Testes | | | | ZAP Express |
| S0044 | Prostate BPH | prostate BPH | Prostate | | disease | Uni-ZAP XR |
| S0045 | Endothelial cells-control | Endothelial cell | endothelial cell- | Cell Line | | Uni-ZAP XR |
| | | | lung | | | |
| S0046 | Endothelial-induced | Endothelial cell | endothelial cell- | Cell Line | | Uni-ZAP XR |
| | | | lung | | | |
| S0049 | Human Brain, Striatum | Human Brain, Striatum | | | | Uni-ZAP XR |
| S0050 | Human Frontal Cortex, | Human Frontal Cortex, | | | disease | Uni-ZAP XR |
| | Schizophrenia | Schizophrenia | | | | |
| S0051 | Human | Human Hypothalamus, | | | disease | Uni-ZAP XR |
| | Hypothalmus, Schizophrenia | Schizophrenia | | | | |
| S0052 | neutrophils control | human neutrophils | blood | Cell Line | | Uni-ZAP XR |
| S0053 | Neutrophils IL-1 and LPS | human neutrophil induced | blood | Cell Line | | Uni-ZAP XR |
| | induced | | | | | |
| S0106 | STRIATUM | | BRAIN | | disease | Uni-ZAP XR |
| | DEPRESSION | | | | | |
| S0110 | Brain Amygdala | | Brain | | disease | Uni-ZAP XR |
| | Depression | | | | | |
| S0112 | Hypothalamus | | Brain | | | Uni-ZAP XR |
| S0114 | Anergic T-cell | Anergic T-cell | | Cell Line | | Uni-ZAP XR |
| S0116 | Bone marrow | Bone marrow | Bone marrow | | | Uni-ZAP XR |
| S0122 | Osteoclastoma-normalized A | Osteoclastoma | bone | | disease | pBluescript |
| S0124 | Smooth muscle-edited A | Smooth muscle | Pulmanary | Cell Line | | Uni-ZAP XR |
| | | | artery | | | |
| S0126 | Osteoblasts | Osteoblasts | Knee | Cell Line | | Uni-ZAP XR |
| S0132 | Epithelial-TNFa and INF | Airway Epithelial | | | | Uni-ZAP XR |
| | induced | | | | | |
| S0134 | Apoptotic T-cell | apoptotic cells | | Cell Line | | Uni-ZAP XR |
| S0136 | PERM TF274 | stromal cell | Bone marrow | Cell Line | | Lambda ZAP II |
| S0140 | eosinophil-IL5 induced | eosinophil | lung | Cell Line | | Uni-ZAP XR |
| S0142 | Macrophage-oxLDL | macrophage-oxidized LDL | blood | Cell Line | | Uni-ZAP XR |
| | | treated | | | | |
| S0144 | Macrophage (GM-CSF | Macrophage (GM-CSF | | | | Uni-ZAP XR |
| | treated) | treated) | | | | |
| S0148 | Normal Prostate | Prostate | prostate | | | Uni-ZAP XR |
| S0150 | LNCAP prostate cell line | LNCAP Cell Line | Prostate | Cell Line | | Uni-ZAP XR |
| S0152 | PC3 Prostate cell line | PC3 prostate cell line | | | | Uni-ZAP XR |
| S0176 | Prostate, normal, | Prostate | prostate | | | Uni-ZAP XR |
| | subtraction I | | | | | |
| S0182 | Human B Cell 8866 | Human B-Cell 8866 | | | | Uni-ZAP XR |
| S0192 | Synovial Fibroblasts | Synovial Fibroblasts | | | | pSport1 |
| | (control) | | | | | |
| S0194 | Synovial hypoxia | Synovial Fibroblasts | | | | pSport1 |
| S0196 | Synovial IL-1/TNF | Synovial Fibroblasts | | | | pSport1 |
| | stimulated | | | | | |
| S0206 | Smooth Muscle- HASTE | Smooth muscle | Pulmanary | Cell Line | | pBluescript |
| | normalized | | artery | | | |
| S0208 | Messangial cell, frac 1 | Messangial cell | | | | pSport1 |
| S0210 | Messangial cell, frac 2 | Messangial cell | | | | pSport1 |
| S0212 | Bone Marrow Stromal | Bone Marrow Stromal | | | | pSport1 |
| | Cell, untreated | Cell, untreated | | | | |
| S0214 | Human Osteoclastoma, re- | Osteoclastoma | bone | | disease | Uni-ZAP XR |
| | excision | | | | | |
| S0216 | Neutrophils IL-1 and LPS | human neutrophil induced | blood | Cell Line | | Uni-ZAP XR |
| | induced | | | | | |
| S0218 | Apoptotic T-cell, re- | apoptotic cells | | Cell Line | | Uni-ZAP XR |
| | excision | | | | | |
| S0220 | H. hypothalamus, frac | Hypothalamus | Brain | | | ZAP Express |
| | A; re-excision | | | | | |
| S0222 | H. Frontal | H. Brain, Frontal Cortex, | Brain | | disease | Uni-ZAP XR |
| | cortex, epileptic; re-excision | Epileptic | | | | |
| S0242 | Synovial Fibroblasts | Synovial Fibroblasts | | | | pSport1 |
| | (Il1/TNF), subt | | | | | |
| S0250 | Human Osteoblasts II | Human Osteoblasts | Femur | | disease | pCMVSport |
| | | | | | | 2.0 |
| S0260 | Spinal Cord, re-excision | Spinal cord | spinal cord | | | Uni-ZAP XR |
| S0276 | Synovial hypoxia-RSF | Synovial fobroblasts | Synovial tissue | | | pSport1 |
| | subtracted | (rheumatoid) | | | | |
| S0278 | H Macrophage (GM-CSF | Macrophage (GM-CSF | | | | Uni-ZAP XR |
| | treated), re-excision | treated) | | | | |
| S0280 | Human Adipose Tissue, re- | Human Adipose Tissue | | | | Uni-ZAP XR |
| | excision | | | | | |
| S0282 | Brain Frontal Cortex, re- | Brain frontal cortex | Brain | | | Lambda ZAP II |
| | excision | | | | | |
| S0294 | Larynx tumor | Larynx tumor | Larynx, vocal | | disease | pSport1 |
| | | | cord | | | |
| S0296 | Normal lung | Normal lung | Lung | | | pSport1 |
| S0298 | Bone marrow | Bone marrow | Bone marrow | | | pSport1 |
| | stroma, treated | stroma, treatedSB | | | | |
| S0300 | Frontal lobe, dementia; re- | Frontal Lobe | Brain | | | Uni-ZAP XR |
| | excision | dementia/Alzheimer''s | | | | |
| S0308 | Spleen/normal | Spleen normal | | | | pSport1 |
| S0310 | Normal trachea | Normal trachea | | | | pSport1 |
| S0312 | Human | Human osteoarthritic | | | disease | pSport1 |
| | osteoarthritic; fraction II | cartilage | | | | |
| S0314 | Human | Human osteoarthritic | | | disease | pSport1 |
| | osteoarthritis; fraction I | cartilage | | | | |
| S0316 | Human Normal | Human Normal Cartilage | | | | pSport1 |
| | Cartilage, Fraction I | | | | | |
| S0318 | Human Normal Cartilage | Human Normal Cartilage | | | | pSport1 |
| | Fraction II | | | | | |
| S0328 | Palate carcinoma | Palate carcinoma | Uvula | | disease | pSport1 |
| S0330 | Palate normal | Palate normal | Uvula | | | pSport1 |
| S0334 | Human Normal Cartilage | Human Normal Cartilage | | | | pSport1 |
| | Fraction III | | | | | |
| S0338 | Human Osteoarthritic | Human osteoarthritic | | | disease | pSport1 |
| | Cartilage Fraction III | cartilage | | | | |
| S0340 | Human Osteoarthritic | Human osteoarthritic | | | disease | pSport1 |
| | Cartilage Fraction IV | cartilage | | | | |
| S0342 | Adipocytes; re-excision | Human Adipocytes from | | | | Uni-ZAP XR |
| | | Osteoclastoma | | | | |
| S0344 | Macrophage-oxLDL; re- | macrophage-oxidized LDL | blood | Cell Line | | Uni-ZAP XR |
| | excision | treated | | | | |
| S0346 | Human Amygdala; re- | Amygdala | | | | Uni-ZAP XR |
| | excision | | | | | |
| S0352 | Larynx Carcinoma | Larynx carcinoma | | | disease | pSport1 |
| S0354 | Colon Normal II | Colon Normal | Colon | | | pSport1 |
| S0356 | Colon Carcinoma | Colon Carcinoma | Colon | | disease | pSport1 |
| S0358 | Colon Normal III | Colon Normal | Colon | | | pSport1 |
| S0360 | Colon Tumor II | Colon Tumor | Colon | | disease | pSport1 |
| S0362 | Human Gastrocnemius | Gastrocnemius muscle | | | | pSport1 |
| S0364 | Human Quadriceps | Quadriceps muscle | | | | pSport1 |
| S0366 | Human Soleus | Soleus Muscle | | | | pSport1 |
| S0370 | Larynx carcinoma II | Larynx carcinoma | | | disease | pSport1 |
| S0372 | Larynx carcinoma III | Larynx carcinoma | | | disease | pSport1 |
| S0374 | Normal colon | Normal colon | | | | pSport1 |
| S0376 | Colon Tumor | Colon Tumor | | | disease | pSport1 |
| S0378 | Pancreas normal PCA4 No | Pancreas Normal PCA4 No | | | | pSport1 |
| S0380 | Pancreas Tumor PCA4 Tu | Pancreas Tumor PCA4 Tu | | | disease | pSport1 |
| S0386 | Human Whole Brain, re- | Whole brain | Brain | | | ZAP Express |
| | excision | | | | | |
| S0388 | Human | Human Hypothalamus, | | | disease | Uni-ZAP XR |
| | Hypothalamus, schizophrenia, | Schizophrenia | | | | |
| | re-excision | | | | | |
| S0390 | Smooth muscle, control; | Smooth muscle | Pulmanary | Cell Line | | Uni-ZAP XR |
| | re-excision | | artery | | | |
| S0392 | Salivary Gland | Salivary gland; normal | | | | pSport1 |
| S0398 | Testis; normal | Testis; normal | | | | pSport1 |
| S0400 | Brain; normal | Brain; normal | | | | pSport1 |
| S0404 | Rectum normal | Rectum, normal | | | | pSport1 |
| S0406 | Rectum tumour | Rectum tumour | | | | pSport1 |
| S0408 | Colon, normal | Colon, normal | | | | pSport1 |
| S0410 | Colon, tumour | Colon, tumour | | | | pSport1 |
| S0412 | Temporal cortex- | Temporal cortex, alzheimer | | | disease | Other |
| | Alzheizmer; subtracted | | | | | |
| S0414 | Hippocampus, Alzheimer | Hippocampus, Alzheimer | | | | Other |
| | Subtracted | Subtracted | | | | |
| S0418 | CHME Cell Line; treated 5 hrs | CHME Cell Line; treated | | | | pCMVSport |
| | | | | | | 3.0 |
| S0420 | CHME Cell Line, untreated | CHME Cell line, untreatetd | | | | pSport1 |
| S0422 | Mo7e Cell Line GM-CSF | Mo7e Cell Line GM-CSF | | | | pCMVSport |
| | treated (1 ng/ml) | treated (1 ng/ml) | | | | 3.0 |
| S0424 | TF-1 Cell Line GM-CSF | TF-1 Cell Line GM-CSF | | | | pSport1 |
| | Treated | Treated | | | | |
| S0426 | Monocyte activated; re- | Monocyte-activated | blood | Cell Line | | Uni-ZAP XR |
| | excision | | | | | |
| S0428 | Neutrophils control; re- | human neutrophils | blood | Cell Line | | Uni-ZAP XR |
| | excision | | | | | |
| S0430 | Aryepiglottis Normal | Aryepiglottis Normal | | | | pSport1 |
| S0432 | Sinus piniformis Tumour | Sinus piniformis Tumour | | | | pSport1 |
| S0434 | Stomach Normal | Stomach Normal | | | disease | pSport1 |
| S0436 | Stomach Tumour | Stomach Tumour | | | disease | pSport1 |
| S0438 | Liver Normal Met5No | Liver Normal Met5No | | | | pSport1 |
| S0440 | Liver Tumour Met 5 Tu | Liver Tumour | | | | pSport1 |
| S0442 | Colon Normal | Colon Normal | | | | pSport1 |
| S0444 | Colon Tumor | Colon Tumour | | | disease | pSport1 |
| S0446 | Tongue Tumour | Tongue Tumour | | | | pSport1 |
| S0448 | Larynx Normal | Larynx Normal | | | | pSport1 |
| S0450 | Larynx Tumour | Larynx Tumour | | | | pSport1 |
| S0452 | Thymus | Thymus | | | | pSport1 |
| S0458 | Thyroid Normal (SDCA2 | Thyroid normal | | | | pSport1 |
| | No) | | | | | |
| S0460 | Thyroid Tumour | Thyroid Tumour | | | | pSport1 |
| S0462 | Thyroid Thyroiditis | Thyroid Thyroiditis | | | | pSport1 |
| S0464 | Larynx Normal | Larynx Normal | | | | pSport1 |
| S0468 | Ea.hy.926 cell line | Ea.hy.926 cell line | | | | pSport1 |
| S0474 | Human blood platelets | Platelets | Blood platelets | | | Other |
| S3012 | Smooth Muscle Serum | Smooth muscle | Pulmanary | Cell Line | | pBluescript |
| | Treated, Norm | | artery | | | |
| S3014 | Smooth muscle, serum | Smooth muscle | Pulmanary | Cell Line | | pBluescript |
| | induced, re-exc | | artery | | | |
| S6014 | H. hypothalamus, frac A | Hypothalamus | Brain | | | ZAP Express |
| S6016 | H. Frontal Cortex, | H. Brain, Frontal Cortex, | Brain | | disease | Uni-ZAP XR |
| | Epileptic | Epileptic | | | | |
| S6022 | H. Adipose Tissue | Human Adipose Tissue | | | | Uni-ZAP XR |
| S6024 | Alzheimers, spongy change | Alzheimer''s/Spongy change | Brain | | disease | Uni-ZAP XR |
| S6026 | Frontal Lobe, Dementia | Frontal Lobe | Brain | | | Uni-ZAP XR |
| | | dementia/Alzheimer''s | | | | |
| S6028 | Human Manic Depression | Human Manic depression | Brain | | disease | Uni-ZAP XR |
| | Tissue | tissue | | | | |
| T0001 | Human Brown Fat | Brown Fat | | | | pBluescript |
| | | | | | | SK− |
| T0002 | Activated T-cells | Activated T-Cell, PBL | Blood | Cell Line | | pBluescript |
| | | fraction | | | | SK− |
| T0003 | Human Fetal Lung | Human Fetal Lung | | | | pBluescript |
| | | | | | | SK− |
| T0004 | Human White Fat | Human White Fat | | | | pBluescript |
| | | | | | | SK− |
| T0006 | Human Pineal Gland | Human Pinneal Gland | | | | pBluescript |
| | | | | | | SK− |
| T0010 | Human Infant Brain | Human Infant Brain | | | | Other |
| T0023 | Human Pancreatic | Human Pancreatic Carcinoma | | | disease | pBluescript |
| | Carcinoma | | | | | SK− |
| T0039 | HSA 172 Cells | Human HSA172 cell line | | | | pBluescript |
| | | | | | | SK− |
| T0040 | HSC172 cells | SA172 Cells | | | | pBluescript |
| | | | | | | SK− |
| T0041 | Jurkat T-cell G1 phase | Jurkat T-cell | | | | pBluescript |
| | | | | | | SK− |
| T0042 | Jurkat T-Cell, S phase | Jurkat T-Cell Line | | | | pBluescript |
| | | | | | | SK− |
| T0048 | Human Aortic | Human Aortic Endothilium | | | | pBluescript |
| | Endothelium | | | | | SK− |
| T0049 | Aorta endothelial cells + TNF-a | Aorta endothelial cells | | | | pBluescript |
| | | | | | | SK− |
| T0060 | Human White Adipose | Human White Fat | | | | pBluescript |
| | | | | | | SK− |
| T0067 | Human Thyroid | Human Thyroid | | | | pBluescript |
| | | | | | | SK− |
| T0068 | Normal Ovary, | Normal Ovary, | | | | pBluescript |
| | Premenopausal | Premenopausal | | | | SK− |
| T0069 | Human Uterus, normal | Human Uterus, normal | | | | pBluescript |
| | | | | | | SK− |
| T0070 | Human Adrenal Gland | Human Adrenal Gland | | | | pBluescript |
| | | | | | | SK− |
| T0071 | Human Bone Marrow | Human Bone Marrow | | | | pBluescript |
| | | | | | | SK− |
| T0082 | Human Adult Retina | Human Adult Retina | | | | pBluescript |
| | | | | | | SK− |
| T0104 | HCC cell line metastisis to | | | | | pBluescript |
| | liver | | | | | SK− |
| T0109 | Human (HCC) cell line | | | | | pBluescript |
| | liver (mouse) metastasis, | | | | | SK− |
| | remake | | | | | |
| T0110 | Human colon carcinoma | | | | | pBluescript |
| | (HCC) cell line, remake | | | | | SK− |
| T0114 | Human (Caco-2) cell line, | | | | | pBluescript |
| | adenocarcinoma, colon, | | | | | SK− |
| | remake | | | | | |
| T0115 | Human Colon Carcinoma | | | | | pBluescript |
| | (HCC) cell line | | | | | SK− |
| L0002 | Atrium cDNA library | | | | | |
| | Human heart | | | | | |
| L0005 | Clontech human aorta | | | | | |
| | polyA+ mRNA (#6572) | | | | | |
| L0009 | EST from 8p21.3-p22 | | | | | |
| L0021 | Human adult (K. Okubo) | | | | | |
| L0022 | Human adult lung 3″ | | | | | |
| | directed MboI cDNA | | | | | |
| L0032 | Human chromosome 12p | | | | | |
| | cDNAs | | | | | |
| L0040 | Human colon mucosa | | | | | |
| L0041 | Human epidermal | | | | | |
| | keratinocyte | | | | | |
| L0055 | Human promyelocyte | | | | | |
| L0065 | Liver HepG2 cell line. | | | | | |
| L0105 | Human aorta polyA+ | aorta | | | | |
| | (TFujiwara) | | | | | |
| L0109 | Human brain cDNA | brain | | | | |
| L0142 | Human placenta cDNA | placenta | | | | |
| | (TFujiwara) | | | | | |
| L0143 | Human placenta polyA+ | placenta | | | | |
| | (TFujiwara) | | | | | |
| L0157 | Human fetal brain | | brain | | | |
| | (TFujiwara) | | | | | |
| L0163 | Human heart cDNA | | heart | | | |
| | (YNakamura) | | | | | |
| L0351 | Infant brain, Bento Soares | | | | | BA, |
| | | | | | | M13-derived |
| L0352 | Normalized infant brain, | | | | | BA, |
| | Bento Soares | | | | | M13-derived |
| L0361 | Stratagene ovary | | ovary | | | Bluescript SK |
| | (#937217) | | | | | |
| L0362 | Stratagene ovarian cancer | | | | | Bluescript SK− |
| | (#937219) | | | | | |
| L0363 | NCI_CGAP_GC2 | germ cell tumor | | | | Bluescript SK− |
| L0364 | NCI_CGAP_GC5 | germ cell tumor | | | | Bluescript SK− |
| L0366 | Stratagene schizo brain | schizophrenic brain S-11 | | | | Bluescript SK− |
| | S11 | frontal lobe | | | | |
| L0369 | NCI_CGAP_AA1 | adrenal adenoma | adrenal gland | | | Bluescript SK− |
| L0371 | NCI_CGAP_Br3 | breast tumor | breast | | | Bluescript SK− |
| L0372 | NCI_CGAP_Co12 | colon tumor | colon | | | Bluescript SK− |
| L0373 | NCI_CGAP_Co11 | tumor | colon | | | Bluescript SK− |
| L0374 | NCI_CGAP_Co2 | tumor | colon | | | Bluescript SK− |
| L0375 | NCI_CGAP_Kid6 | kidney tumor | kidney | | | Bluescript SK− |
| L0376 | NCI_CGAP_Lar1 | larynx | larynx | | | Bluescript SK− |
| L0378 | NCI_CGAP_Lu1 | lung tumor | lung | | | Bluescript SK− |
| L0381 | NCI_CGAP_HN4 | squamous cell carcinoma | pharynx | | | Bluescript SK− |
| L0382 | NCI_CGAP_Pr25 | epithelium (cell line) | prostate | | | Bluescript SK− |
| L0383 | NCI_CGAP_Pr24 | invasive tumor (cell line) | prostate | | | Bluescript SK− |
| L0384 | NCI_CGAP_Pr23 | prostate tumor | prostate | | | Bluescript SK− |
| L0387 | NCI_CGAP_GCB0 | germinal center B-cells | tonsil | | | Bluescript SK− |
| L0388 | NCI_CGAP_HN6 | normal gingiva (cell line from | | | | Bluescript SK− |
| | | immortalized kerati | | | | |
| L0411 | 1-NIB | | | | | Lafmid BA |
| L0414 | b4HB3MA | | | | | Lafmid BA |
| L0422 | b4HB3MA-Cot12-HAP-B | | | | | Lafmid BA |
| L0435 | Infant brain, LLNL array | | | | | lafmid BA |
| | of Dr. M. Soares 1NIB | | | | | |
| L0438 | normalized infant brain | total brain | brain | | | lafmid BA |
| | cDNA | | | | | |
| L0439 | Soares infant brain 1NIB | | whole brain | | | Lafmid BA |
| L0442 | 4HB3MK | | | | | Lafmid BK |
| L0455 | Human retina cDNA | retina | eye | | | lambda gt10 |
| | randomly primed | | | | | |
| | sublibrary | | | | | |
| L0456 | Human retina cDNA | retina | eye | | | lambda gt10 |
| | Tsp509I-cleaved sublibrary | | | | | |
| L0457 | multi-tissue normalized | multi-tissue | pooled | | | lambda gt10 |
| | short-fragment | | | | | |
| L0468 | HE6W | | | | | lambda zap |
| L0471 | Human fetal heart, Lambda | | | | | Lambda ZAP |
| | ZAP Express | | | | | Express |
| L0475 | KG1-a Lambda Zap | | | KG1-a | | Lambda Zap |
| | Express cDNA library | | | | | Express |
| | | | | | | (Stratagene) |
| L0481 | CD34+DIRECTIONAL | | | | | Lambda ZAPII |
| L0483 | Human pancreatic islet | | | | | Lambda ZAPII |
| L0485 | STRATAGENE Human | skeletal muscle | leg muscle | | | Lambda ZAPII |
| | skeletal muscle cDNA | | | | | |
| | library, cat. #936215. | | | | | |
| L0493 | NCI_CGAP_Ov26 | papillary serous carcinoma | ovary | | | pAMP1 |
| L0497 | NCI_CGAP_HSC4 | CD34+, CD38− from normal | bone marrow | | | pAMP1 |
| | | bone marrow donor | | | | |
| L0498 | NCI_CGAP_HSC3 | CD34+, T negative, patient | bone marrow | | | pAMP1 |
| | | with chronic myelogenou | | | | |
| L0500 | NCI_CGAP_Brn20 | oligodendroglioma | brain | | | pAMP1 |
| L0504 | NCI_CGAP_Br13 | breast carcinoma in situ | breast | | | pAMP1 |
| L0512 | NCI_CGAP_Ov36 | borderline ovarian carcinoma | ovary | | | pAMP1 |
| L0514 | NCI_CGAP_Ov31 | papillary serous carcinoma | ovary | | | pAMP1 |
| L0515 | NCI_CGAP_Ov32 | papillary serous carcinoma | ovary | | | pAMP1 |
| L0517 | NCI_CGAP_Pr1 | | | | | pAMP10 |
| L0518 | NCI_CGAP_Pr2 | | | | | pAMP10 |
| L0519 | NCI_CGAP_Pr3 | | | | | pAMP10 |
| L0520 | NCI_CGAP_Alv1 | alveolar rhabdomyosarcoma | | | | pAMP10 |
| L0521 | NCI_CGAP_Ew1 | Ewing''s sarcoma | | | | pAMP10 |
| L0523 | NCI_CGAP_Lip2 | liposarcoma | | | | pAMP10 |
| L0526 | NCI_CGAP_Pr12 | metastatic prostate bone | | | | pAMP10 |
| | | lesion | | | | |
| L0527 | NCI_CGAP_Ov2 | ovary | | | | pAMP10 |
| L0528 | NCI_CGAP_Pr5 | prostate | | | | pAMP10 |
| L0529 | NCI_CGAP_Pr6 | prostate | | | | pAMP10 |
| L0530 | NCI_CGAP_Pr8 | prostate | | | | pAMP10 |
| L0531 | NCI_CGAP_Pr20 | prostate metastasis, liver | | | | pAMP10 |
| L0533 | NCI_CGAP_HSC1 | stem cells | bone marrow | | | pAMP10 |
| L0534 | Chromosome 7 Fetal Brain | brain | brain | | | pAMP10 |
| | cDNA Library | | | | | |
| L0535 | NCI_CGAP_Br5 | infiltrating ductal carcinoma | breast | | | pAMP10 |
| L0539 | Chromosome 7 Placental | | placenta | | | pAMP10 |
| | cDNA Library | | | | | |
| L0540 | NCI_CGAP_Pr10 | invasive prostate tumor | prostate | | | pAMP10 |
| L0542 | NCI_CGAP_Pr11 | normal prostatic epithelial | prostate | | | pAMP10 |
| | | cells | | | | |
| L0547 | NCI_CGAP_Pr16 | tumor | prostate | | | pAMP10 |
| L0549 | NCI_CGAP_HN10 | carcinoma in situ from | | | | pAMP10 |
| | | retromolar trigone | | | | |
| L0550 | NCI_CGAP_HN9 | normal squamous epithelium | | | | pAMP10 |
| | | from retromolar trigone | | | | |
| L0559 | NCI_CGAP_Ov39 | papillary serous ovarian | ovary | | | pAMP10 |
| | | metastasis | | | | |
| L0561 | NCI_CGAP_HN11 | normal squamous epithelium | tongue | | | pAMP10 |
| L0562 | Chromosome 7 HeLa | | | HeLa cell line; | | pAMP10 |
| | cDNA Library | | | ATCC | | |
| L0563 | Human Bone Marrow | bone marrow | | | | pBluescript |
| | Stromal Fibroblast | | | | | |
| L0564 | Jia bone marrow stroma | bone marrow stroma | | | | pBluescript |
| L0565 | Normal Human Trabecular | Bone | Hip | | | pBluescript |
| | Bone Cells | | | | | |
| L0581 | Stratagene liver (#937224) | | liver | | | pBluescript SK |
| L0587 | Stratagene colon HT29 | | | | | pBluescript |
| | (#937221) | | | | | SK− |
| L0588 | Stratagene endothelial cell | | | | | pBluescript |
| | 937223 | | | | | SK− |
| L0589 | Stratagene fetal retina | | | | | pBluescript |
| | 937202 | | | | | SK− |
| L0590 | Stratagene fibroblast | | | | | pBluescript |
| | (#937212) | | | | | SK− |
| L0591 | Stratagene HeLa cell s3 | | | | | pBluescript |
| | 937216 | | | | | SK− |
| L0592 | Stratagene hNT neuron | | | | | pBluescript |
| | (#937233) | | | | | SK− |
| L0593 | Stratagene neuroepithelium | | | | | pBluescript |
| | (#937231) | | | | | SK− |
| L0594 | Stratagene neuroepithelium | | | | | pBluescript |
| | NT2RAMI 937234 | | | | | SK− |
| L0595 | Stratagene NT2 neuronal | neuroepithelial cells | brain | | | pBluescript |
| | precursor 937230 | | | | | SK− |
| L0596 | Stratagene colon (#937204) | | colon | | | pBluescript |
| | | | | | | SK− |
| L0597 | Stratagene corneal stroma | | cornea | | | pBluescript |
| | (#937222) | | | | | SK− |
| L0598 | Morton Fetal Cochlea | cochlea | ear | | | pBluescript |
| | | | | | | SK− |
| L0599 | Stratagene lung (#937210) | | lung | | | pBluescript |
| | | | | | | SK− |
| L0600 | Weizmann Olfactory | olfactory epithelium | nose | | | pBluescript |
| | Epithelium | | | | | SK− |
| L0601 | Stratagene pancreas | | pancreas | | | pBluescript |
| | (#937208) | | | | | SK− |
| L0602 | Pancreatic Islet | pancreatic islet | pancreas | | | pBluescript |
| | | | | | | SK− |
| L0603 | Stratagene placenta | | placenta | | | pBluescript |
| | (#937225) | | | | | SK− |
| L0604 | Stratagene muscle 937209 | muscle | skeletal muscle | | | pBluescript |
| | | | | | | SK− |
| L0605 | Stratagene fetal spleen | fetal spleen | spleen | | | pBluescript |
| | (#937205) | | | | | SK− |
| L0606 | NCI_CGAP_Lym5 | follicular lymphoma | lymph node | | | pBluescript |
| | | | | | | SK− |
| L0607 | NCI_CGAP_Lym6 | mantle cell lymphoma | lymph node | | | pBluescript |
| | | | | | | SK− |
| L0608 | Stratagene lung carcinoma | lung carcinoma | lung | NCI-H69 | | pBluescript |
| | 937218 | | | | | SK− |
| L0612 | Schiller oligodendroglioma | oligodendroglioma | brain | | | pBluescript |
| | | | | | | SK− |
| | | | | | | (Stratagene) |
| L0615 | 22 week old human fetal | | | | | pBluescriptII |
| | | | | | | SK(−) |
| | liver cDNA library | | | | | |
| L0619 | Chromosome 9 exon II | | | | | pBluescriptIIKS+ |
| L0622 | HM1 | | | | | pcDNAII |
| | | | | | | (Invitrogen) |
| L0623 | HM3 | pectoral muscle (after | | | | pcDNAII |
| | | mastectomy) | | | | (Invitrogen) |
| L0625 | NCI_CGAP_AR1 | bulk alveolar tumor | | | | pCMV-SPORT2 |
| L0626 | NCI_CGAP_GC1 | bulk germ cell seminoma | | | | pCMV-SPORT2 |
| L0627 | NCI_CGAP_Co1 | bulk tumor | colon | | | pCMV-SPORT2 |
| L0628 | NCI_CGAP_Ov1 | ovary bulk tumor | ovary | | | pCMV-SPORT2 |
| L0629 | NCI_CGAP_Me13 | metastatic melanoma to | bowel (skin | | | pCMV-SPORT4 |
| | | bowel | primary) | | | |
| L0630 | NCI_CGAP_CNS1 | substantia nigra | brain | | | pCMV-SPORT4 |
| L0631 | NCI_CGAP_Br7 | | breast | | | pCMV-SPORT4 |
| L0635 | NCI_CGAP_PNS1 | dorsal root ganglion | peripheral | | | pCMV-SPORT4 |
| | | | nervous system | | | |
| L0636 | NCI_CGAP_Pit1 | four pooled pituitary | brain | | | pCMV-SPORT6 |
| | | adenomas | | | | |
| L0637 | NCI_CGAP_Brn53 | three pooled meningiomas | brain | | | pCMV-SPORT6 |
| L0638 | NCI_CGAP_Brn35 | tumor, 5 pooled (see | brain | | | pCMV-SPORT6 |
| | | description) | | | | |
| L0639 | NCI_CGAP_Brn52 | tumor, 5 pooled (see | brain | | | pCMV-SPORT6 |
| | | description) | | | | |
| L0640 | NCI_CGAP_Br18 | four pooled high-grade | breast | | | pCMV-SPORT6 |
| | | tumors, including two prima | | | | |
| L0641 | NCI_CGAP_Co17 | juvenile granulosa tumor | colon | | | pCMV-SPORT6 |
| L0642 | NCI_CGAP_Co18 | moderately differentiated | colon | | | pCMV-SPORT6 |
| | | adenocarcinoma | | | | |
| L0643 | NCI_CGAP_Co19 | moderately differentiated | colon | | | pCMV-SPORT6 |
| | | adenocarcinoma | | | | |
| L0644 | NCI_CGAP_Co20 | moderately differentiated | colon | | | pCMV-SPORT6 |
| | | adenocarcinoma | | | | |
| L0645 | NCI_CGAP_Co21 | moderately differentiated | colon | | | pCMV-SPORT6 |
| | | adenocarcinoma | | | | |
| L0646 | NCI_CGAP_Co14 | moderately-differentiated | colon | | | pCMV-SPORT6 |
| | | adenocarcinoma | | | | |
| L0647 | NCI_CGAP_Sar4 | five pooled sarcomas, | connective | | | pCMV-SPORT6 |
| | | including myxoid | tissue | | | |
| | | liposarcoma | | | | |
| L0648 | NCI_CGAP_Eso2 | squamous cell carcinoma | esophagus | | | pCMV-SPORT6 |
| L0649 | NCI_CGAP_GU1 | 2 pooled high-grade | genitourinary | | | pCMV-SPORT6 |
| | | transitional cell tumors | tract | | | |
| L0650 | NCI_CGAP_Kid13 | 2 pooled Wilms'' tumors, one | kidney | | | pCMV-SPORT6 |
| | | primary and one metast | | | | |
| L0651 | NCI_CGAP_Kid8 | renal cell tumor | kidney | | | pCMV-SPORT6 |
| L0652 | NCI_CGAP_Lu27 | four pooled poorly- | lung | | | pCMV-SPORT6 |
| | | differentiated | | | | |
| | | adenocarcinomas | | | | |
| L0653 | NCI_CGAP_Lu28 | two pooled squamous cell | lung | | | pCMV-SPORT6 |
| | | carcinomas | | | | |
| L0654 | NCI_CGAP_Lu31 | | lung, cell line | | | pCMV-SPORT6 |
| L0655 | NCI_CGAP_Lym12 | lymphoma, follicular mixed | lymph node | | | pCMV-SPORT6 |
| | | small and large cell | | | | |
| L0656 | NCI_CGAP_Ov38 | normal epithelium | ovary | | | pCMV-SPORT6 |
| L0657 | NCI_CGAP_Ov23 | tumor, 5 pooled (see | ovary | | | pCMV-SPORT6 |
| | | description) | | | | |
| L0658 | NCI_CGAP_Ov35 | tumor, 5 pooled (see | ovary | | | pCMV-SPORT6 |
| | | description) | | | | |
| L0659 | NCI_CGAP_Pan1 | adenocarcinoma | pancreas | | | pCMV-SPORT6 |
| L0661 | NCI_CGAP_Mel15 | malignant melanoma, | skin | | | pCMV-SPORT6 |
| | | metastatic to lymph node | | | | |
| L0662 | NCI_CGAP_Gas4 | poorly differentiated | stomach | | | pCMV-SPORT6 |
| | | adenocarcinoma with signet r | | | | |
| L0663 | NCI_CGAP_Ut2 | moderately-differentiated | uterus | | | pCMV-SPORT6 |
| | | endometrial adenocarcino | | | | |
| L0664 | NCI_CGAP_Ut3 | poorly-differentiated | uterus | | | pCMV-SPORT6 |
| | | endometrial adenocarcinoma, | | | | |
| L0665 | NCI_CGAP_Ut4 | serous papillary carcinoma, | uterus | | | pCMV-SPORT6 |
| | | high grade, 2 pooled t | | | | |
| L0666 | NCI_CGAP_Ut1 | well-differentiated | uterus | | | pCMV-SPORT6 |
| | | endometrial | | | | |
| | | adenocarcinoma, 7 | | | | |
| L0667 | NCI_CGAP_CML1 | myeloid cells, 18 pooled | whole blood | | | pCMV-SPORT6 |
| | | CML cases, BCR/ABL rearra | | | | |
| L0684 | Stanley Frontal SB pool 1 | frontal lobe (see description) | brain | | | pCR2.1-TOPO |
| | | | | | | (Invitrogen) |
| L0710 | NIH_MGC_7 | small cell carcinoma | lung | MGC3 | | pOTB7 |
| L0717 | Gessler Wilms tumor | | | | | pSPORT1 |
| L0718 | Testis 5 | | | | | pSPORT1 |
| L0731 | Soares_pregnant_uterus_NbHPU | | uterus | | | pT7T3-Pac |
| L0738 | Human colorectal cancer | | | | | pT7T3D |
| L0740 | Soares melanocyte 2NbHM | melanocyte | | | | pT7T3D |
| | | | | | | (Pharmacia) |
| | | | | | | with a |
| | | | | | | modified |
| | | | | | | polylinker |
| L0741 | Soares adult brain | | brain | | | pT7T3D |
| | N2b4HB55Y | | | | | (Pharmacia) |
| | | | | | | with a |
| | | | | | | modified |
| | | | | | | polylinker |
| L0742 | Soares adult brain | | brain | | | pT7T3D |
| | N2b5HB55Y | | | | | (Pharmacia) |
| | | | | | | with a modified |
| | | | | | | polylinker |
| L0743 | Soares breast 2NbHBst | | breast | | | pT7T3D |
| | | | | | | (Pharmacia) |
| | | | | | | with a |
| | | | | | | modified |
| | | | | | | polylinker |
| L0744 | Soares breast 3NbHBst | | breast | | | pT7T3D |
| | | | | | | (Pharmacia) |
| | | | | | | with a |
| | | | | | | modified |
| | | | | | | polylinker |
| L0745 | Soares retina N2b4HR | retina | eye | | | pT7T3D |
| | | | | | | (Pharmacia) |
| | | | | | | with a |
| | | | | | | modified |
| | | | | | | polylinker |
| L0746 | Soares retina N2b5HR | retina | eye | | | pT7T3D |
| | | | | | | (Pharmacia) |
| | | | | | | with a |
| | | | | | | modified |
| | | | | | | polylinker |
| L0747 | Soares_fetal_heart_NbHH19W | | heart | | | pT7T3D |
| | | | | | | (Pharmacia) |
| | | | | | | with a |
| | | | | | | modified |
| | | | | | | polylinker |
| L0748 | Soares fetal liver spleen | | Liver and | | | pT7T3D |
| | 1NFLS | | Spleen | | | (Pharmacia) with |
| | | | | | | a |
| | | | | | | modified |
| | | | | | | polylinker |
| L0749 | Soares_fetal_liver_spleen_1NFLS_S1 | | Liver and | | | pT7T3D |
| | | | Spleen | | | (Pharmacia) with |
| | | | | | | a modified |
| | | | | | | polylinker |
| L0750 | Soares_fetal_lung_NbHL19W | | lung | | | pT7T3D |
| | | | | | | (Pharmacia) |
| | | | | | | with a |
| | | | | | | modified |
| | | | | | | polylinker |
| L0751 | Soares ovary tumor | ovarian tumor | ovary | | | pT7T3D |
| | | | | | | (Pharmacia) |
| | NbHOT | | | | | with a |
| | | | | | | modified |
| | | | | | | polylinker |
| L0752 | Soares_parathyroid_tumor_NbHPA | parathyroid tumor | parathyroid | | | pT7T3D |
| | | | gland | | | (Pharmacia) |
| | | | | | | with a |
| | | | | | | modified |
| | | | | | | polylinker |
| L0753 | Soares_pineal_gland_N3HPG | | pineal gland | | | pT7T3D |
| | | | | | | (Pharmacia) |
| | | | | | | with a |
| | | | | | | modified |
| | | | | | | polylinker |
| L0754 | Soares placenta Nb2HP | | placenta | | | pT7T3D |
| | | | | | | (Pharmacia) |
| | | | | | | with a |
| | | | | | | modified |
| | | | | | | polylinker |
| L0755 | Soares_placenta_8to9weeks_2NbHP8to9W | | placenta | | | pT7T3D |
| | | | | | | (Pharmacia) |
| | | | | | | with a |
| | | | | | | modified |
| | | | | | | polylinker |
| L0756 | Soares_multiple_sclerosis_2NbHMSP | multiple sclerosis lesions | | | | pT7T3D |
| | | | | | | (Pharmacia) |
| | | | | | | with a |
| | | | | | | modified |
| | | | | | | polylinker |
| | | | | | | V_TYPE |
| L0757 | Soares_senescent_fibroblasts_NbHSF | senescent fibroblast | | | | pT7T3D |
| | | | | | | (Pharmacia) |
| | | | | | | with a |
| | | | | | | modified |
| | | | | | | polylinker |
| | | | | | | V_TYPE |
| L0758 | Soares_testis_NHT | | | | | pT7T3D-Pac |
| | | | | | | (Pharmacia) |
| | | | | | | with a |
| | | | | | | modified |
| | | | | | | polylinker |
| L0759 | Soares_total_fetus_Nb2HF8_9w | | | | | pT7T3D-Pac |
| | | | | | | (Pharmacia) |
| | | | | | | with a |
| | | | | | | modified |
| | | | | | | polylinker |
| L0761 | NCI_CGAP_CLL1 | B-cell, chronic lymphotic | | | | pT7T3D-Pac |
| | | | | | | (Pharmacia) |
| | | leukemia | | | | with a |
| | | | | | | modified |
| | | | | | | polylinker |
| L0762 | NCI_CGAP_Br1.1 | breast | | | | pT7T3D-Pac |
| | | | | | | (Pharmacia) |
| | | | | | | with a |
| | | | | | | modified |
| | | | | | | polylinker |
| L0763 | NCI_CGAP_Br2 | breast | | | | pT7T3D-Pac |
| | | | | | | (Pharmacia) |
| | | | | | | with a |
| | | | | | | modified |
| | | | | | | polylinker |
| L0764 | NCI_CGAP_Co3 | colon | | | | pT7T3D-Pac |
| | | | | | | (Pharmacia) |
| | | | | | | with a |
| | | | | | | modified |
| | | | | | | polylinker |
| L0765 | NCI_CGAP_Co4 | colon | | | | pT7T3D-Pac |
| | | | | | | (Pharmacia) |
| | | | | | | with a |
| | | | | | | modified |
| | | | | | | polylinker |
| L0766 | NCI_CGAP_GCB1 | germinal center B cell | | | | pT7T3D-Pac |
| | | | | | | (Pharmacia) |
| | | | | | | with a |
| | | | | | | modified |
| | | | | | | polylinker |
| L0767 | NCI_CGAP_GC3 | pooled germ cell tumors | | | | pT7T3D-Pac |
| | | | | | | (Pharmacia) |
| | | | | | | with a |
| | | | | | | modified |
| | | | | | | polylinker |
| L0768 | NCI_CGAP_GC4 | pooled germ cell tumors | | | | pT7T3D-Pac |
| | | | | | | (Pharmacia) |
| | | | | | | with a |
| | | | | | | modified |
| | | | | | | polylinker |
| L0769 | NCI_CGAP_Brn25 | anaplastic oligodendroglioma | brain | | | pT7T3D-Pac |
| | | | | | | (Pharmacia) |
| | | | | | | with a |
| | | | | | | modified |
| | | | | | | polylinker |
| L0770 | NCI_CGAP_Brn23 | glioblastoma (pooled) | brain | | | pT7T3D-Pac |
| | | | | | | (Pharmacia) |
| | | | | | | with a |
| | | | | | | modified |
| | | | | | | polylinker |
| L0771 | NCI_CGAP_Co8 | adenocarcinoma | colon | | | pT7T3D-Pac |
| | | | | | | (Pharmacia) |
| | | | | | | with a |
| | | | | | | modified |
| | | | | | | polylinker |
| L0772 | NCI_CGAP_Co10 | colon tumor RER+ | colon | | | pT7T3D-Pac |
| | | | | | | (Pharmacia) |
| | | | | | | with a |
| | | | | | | modified |
| | | | | | | polylinker |
| L0773 | NCI_CGAP_Co9 | colon tumor RER+ | colon | | | pT7T3D-Pac |
| | | | | | | (Pharmacia) |
| | | | | | | with a |
| | | | | | | modified |
| | | | | | | polylinker |
| L0774 | NCI_CGAP_Kid3 | | kidney | | | pT7T3D-Pac |
| | | | | | | (Pharmacia) |
| | | | | | | with a |
| | | | | | | modified |
| | | | | | | polylinker |
| L0775 | NCI_CGAP_Kid5 | 2 pooled tumors (clear cell | kidney | | | pT7T3D-Pac |
| | | type) | | | | (Pharmacia) |
| | | | | | | with a |
| | | | | | | modified |
| | | | | | | polylinker |
| L0776 | NCI_CGAP_Lu5 | carcinoid | lung | | | pT7T3D-Pac |
| | | | | | | (Pharmacia) |
| | | | | | | with a |
| | | | | | | modified |
| | | | | | | polylinker |
| L0777 | Soares_NhHMPu_S1 | Pooled human melanocyte, | mixed (see | | | pT7T3D-Pac |
| | | fetal heart, and pregnant | below) | | | (Pharmacia) |
| | | | | | | with a |
| | | | | | | modified |
| | | | | | | polylinker |
| L0779 | Soares_NFL_T_GBC_S1 | | pooled | | | pT7T3D-Pac |
| | | | | | | (Pharmacia) |
| | | | | | | with a |
| | | | | | | modified |
| | | | | | | polylinker |
| L0780 | Soares_NSF_F8_9W_OT_PA_P_S1 | | pooled | | | pT7T3D-Pac |
| | | | | | | (Pharmacia) |
| | | | | | | with a |
| | | | | | | modified |
| | | | | | | polylinker |
| L0782 | NCI_CGAP_Pr21 | normal prostate | prostate | | | pT7T3D-Pac |
| | | | | | | (Pharmacia) |
| | | | | | | with a |
| | | | | | | modified |
| | | | | | | polylinker |
| L0783 | NCI_CGAP_Pr22 | normal prostate | prostate | | | pT7T3D-Pac |
| | | | | | | (Pharmacia) |
| | | | | | | with a |
| | | | | | | modified |
| | | | | | | polylinker |
| L0784 | NCI_CGAP_Lei2 | leiomyosarcoma | soft tissue | | | pT7T3D-Pac |
| | | | | | | (Pharmacia) |
| | | | | | | with a |
| | | | | | | modified |
| | | | | | | polylinker |
| L0785 | Barstead spleen HPLRB2 | | spleen | | | pT7T3D-Pac |
| | | | | | | (Pharmacia) |
| | | | | | | with a |
| | | | | | | modified |
| | | | | | | polylinker |
| L0786 | Soares_NbHFB | | whole brain | | | pT7T3D-Pac |
| | | | | | | (Pharmacia) |
| | | | | | | with a |
| | | | | | | modified |
| | | | | | | polylinker |
| L0787 | NCI_CGAP_Sub1 | | | | | pT7T3D-Pac |
| | | | | | | (Pharmacia) |
| | | | | | | with a |
| | | | | | | modified |
| | | | | | | polylinker |
| L0788 | NCI_CGAP_Sub2 | | | | | pT7T3D-Pac |
| | | | | | | (Pharmacia) |
| | | | | | | with a |
| | | | | | | modified |
| | | | | | | polylinker |
| L0789 | NCI_CGAP_Sub3 | | | | | pT7T3D-Pac |
| | | | | | | (Pharmacia) |
| | | | | | | with a |
| | | | | | | modified |
| | | | | | | polylinker |
| L0790 | NCI_CGAP_Sub4 | | | | | pT7T3D-Pac |
| | | | | | | (Pharmacia) |
| | | | | | | with a |
| | | | | | | modified |
| | | | | | | polylinker |
| L0791 | NCI_CGAP_Sub5 | | | | | pT7T3D-Pac |
| | | | | | | (Pharmacia) |
| | | | | | | with a |
| | | | | | | modified |
| | | | | | | polylinker |
| L0792 | NCI_CGAP_Sub6 | | | | | pT7T3D-Pac |
| | | | | | | (Pharmacia) |
| | | | | | | with a |
| | | | | | | modified |
| | | | | | | polylinker |
| L0793 | NCI_CGAP_Sub7 | | | | | pT7T3D-Pac |
| | | | | | | (Pharmacia) |
| | | | | | | with a |
| | | | | | | modified |
| | | | | | | polylinker |
| L0794 | NCI_CGAP_GC6 | pooled germ cell tumors | | | | pT7T3D-Pac |
| | | | | | | (Pharmacia) |
| | | | | | | with a |
| | | | | | | modified |
| | | | | | | polylinker |
| L0796 | NCI_CGAP_Brn50 | medulloblastoma | brain | | | pT7T3D-Pac |
| | | | | | | (Pharmacia) |
| | | | | | | with a |
| | | | | | | modified |
| | | | | | | polylinker |
| L0800 | NCI_CGAP_Co16 | colon tumor, RER+ | colon | | | pT7T3D-Pac |
| | | | | | | (Pharmacia) |
| | | | | | | with a |
| | | | | | | modified |
| | | | | | | polylinker |
| L0803 | NCI_CGAP_Kid11 | | kidney | | | pT7T3D-Pac |
| | | | | | | (Pharmacia) |
| | | | | | | with a |
| | | | | | | modified |
| | | | | | | polylinker |
| L0804 | NCI_CGAP_Kid12 | 2 pooled tumors (clear cell | kidney | | | pT7T3D-Pac |
| | | type) | | | | (Pharmacia) |
| | | | | | | with a |
| | | | | | | modified |
| | | | | | | polylinker |
| L0805 | NCI_CGAP_Lu24 | carcinoid | lung | | | pT7T3D-Pac |
| | | | | | | (Pharmacia) |
| | | | | | | with a |
| | | | | | | modified |
| | | | | | | polylinker |
| L0806 | NCI_CGAP_Lu19 | squamous cell carcinoma, | lung | | | pT7T3D-Pac |
| | | poorly differentiated (4 | | | | (Pharmacia) |
| | | | | | | with a |
| | | | | | | modified |
| | | | | | | polylinker |
| L0807 | NCI_CGAP_Ov18 | fibrotheoma | ovary | | | pT7T3D-Pac |
| | | | | | | (Pharmacia) |
| | | | | | | with a |
| | | | | | | modified |
| | | | | | | polylinker |
| L0809 | NCI_CGAP_Pr28 | | prostate | | | pT7T3D-Pac |
| | | | | | | (Pharmacia) |
| | | | | | | with a |
| | | | | | | modified |
| | | | | | | polylinker |
| L1819 | HT0268 | | head_neck | | | puc18 |
| L2251 | Human fetal lung | Fetal lung | | | | |
| L2257 | NIH_MGC_65 | adenocarcinoma | colon | | | pCMV- |
| | | | | | | SPORT6 |
| L2258 | NIH_MGC_67 | retinoblastoma | eye | | | pCMV- |
| | | | | | | SPORT6 |
| L2259 | NIH_MGC_68 | large cell carcinoma | lung | | | pCMV- |
| | | | | | | SPORT6 |
| L2260 | NIH_MGC_69 | large cell carcinoma, | lung | | | pCMV- |
| | | undifferentiated | | | | SPORT6 |
| L2261 | NIH_MGC_70 | epithelioid carcinoma | pancreas | | | pCMV- |
| | | | | | | SPORT6 |
| L2262 | NIH_MGC_72 | melanotic melanoma | skin | | | pCMV- |
| | | | | | | SPORT6 |
| L2263 | NIH_MGC_66 | adenocarcinoma | ovary | | | pCMV- |
| | | | | | | SPORT6 |
| L2264 | NIH_MGC_71 | leiomyosarcoma | uterus | | | pCMV- |
| | | | | | | SPORT6 |
| L2265 | NIH_MGC_39 | adenocarcinoma | pancreas | | | pOTB7 |
| L2270 | Lupski_dorsal_root_ganglion | dorsal root ganglia | | | | pCMV- |
| | | | | | | SPORT6 (Life |
| | | | | | | Technologies) |
| L2289 | BT0757 | | breast | | | puc18 |
| L2336 | CT0428 | | colon | | | puc18 |
| L2368 | UT0041 | | uterus_tumor | | | puc18 |
| L2380 | NN0068 | | nervous_normal | | | puc18 |
| L2381 | NN0070 | | nervous_normal | | | puc18 |
| L2412 | NN0136 | | nervous_normal | | | puc18 |
| L2482 | HT0497 | | head_neck | | | puc18 |
| L2486 | HT0527 | | head_neck | | | puc18 |
| L2497 | HT0618 | | head_neck | | | puc18 |
| L2504 | HT0636 | | head_neck | | | puc18 |
| L2543 | HT0734 | | head_neck | | | puc18 |
| L2551 | HT0744 | | head_neck | | | puc18 |
| L2653 | NIH_MGC_58 | hypernephroma | kidney | | | pDNR-LIB |
| | | | | | | (Clontech) |
| L2654 | NIH_MGC_9 | adenocarcinoma cell line | ovary | | | pOTB7 |
| L2655 | NIH_MGC_55 | from acute myelogenous | bone marrow | | | pDNR-LIB |
| | | leukemia | | | | (Clontech) |
| L2669 | NT0022 | | nervous_tumor | | | puc18 |
| L2673 | NT0028 | | nervous_tumor | | | puc18 |
| L2706 | NT0102 | | nervous_tumor | | | puc18 |
| L2744 | FT0004 | | prostate_tumor | | | puc18 |
| L2758 | FT0027 | | prostate_tumor | | | puc18 |
| L2759 | FT0028 | | prostate_tumor | | | puc18 |
| L2767 | FT0044 | | prostate_tumor | | | puc18 |
| L2877 | AN0027 | | amnion_normal | | | puc18 |
| L2904 | BN0042 | | breast_normal | | | puc18 |
| L2910 | BN0070 | | breast_normal | | | puc18 |
| L2915 | BN0098 | | breast_normal | | | puc18 |
| L2985 | BN0257 | | breast_normal | | | puc18 |
| L2991 | BN0264 | | breast_normal | | | puc18 |
| L3019 | BN0303 | | breast_normal | | | puc18 |
| L3280 | FN0106 | | prostate_normal | | | puc18 |
| L3357 | TN0034 | | testis_normal | | | puc18 |
| L3372 | TN0068 | | testis_normal | | | puc18 |
| L3387 | GKB | hepatocellular carcinoma | | | | pBluescript |
| | | | | | | sk(−) |
| L3388 | GKC | hepatocellular carcinoma | | | | pBluescript |
| | | | | | | sk(−) |
| L3391 | NIH_MGC_53 | carcinoma, cell line | bladder | | | pDNR-LIB |
| | | | | | | (Clontech) |
| L3499 | HT0617 | | head_neck | | | puc18 |
| L3503 | HT0870 | | head_neck | | | puc18 |
| L3560 | TN0023 | | testis_normal | | | puc18 |
| L3585 | TN0119 | | testis_normal | | | puc18 |
| L3642 | ADA | Adrenal gland | | | | pBluescript |
| | | | | | | sk(−) |
| L3643 | ADB | Adrenal gland | | | | pBluescript |
| | | | | | | sk(−) |
| L3644 | ADC | Adrenal gland | | | | pBluescript |
| | | | | | | sk(−) |
| L3645 | Cu | adrenal cortico adenoma for | | | | pBluescript |
| | | Cushing''s syndrome | | | | sk(−) |
| L3646 | DCA | | | | | pTriplEx2 |
| L3649 | DCB | | | | | pTriplEx2 |
| L3651 | FHTA | hypothalamus | | | | pTriplEx2 |
| L3653 | HTB | Hypothalamus | | | | pBluescript |
| | | | | | | sk(−) |
| L3655 | HTC | Hypothalamus | | | | pBluescript |
| | | | | | | sk(−) |
| L3658 | cdA | pheochromocytoma | | | | pTriplEx2 |
| L3659 | CB | cord blood | | | | pBluescript |
| L3663 | NIH_MGC_60 | adenocarcinoma | prostate | | | pDNR-LIB |
| | | | | | | (Clontech) |
| L3811 | NPC | pituitary | | | | pBluescript |
| | | | | | | sk(−) |
| L3812 | NPD | pituitary | | | | pBluescript |
| | | | | | | sk(−) |
| L3815 | MDS | Bone marrow | | | | pTriplEx2 |
| L3816 | HEMBA1 | whole embryo, mainly head | | | | pME18SFL3 |
| L3817 | HEMBB1 | whole embryo, mainly body | | | | pME18SFL3 |
| L3818 | MAMMA1 | mammary gland | | | | pME18SFL3 |
| L3824 | NT2RM2 | | | NT2 | | pME18SFL3 |
| L3825 | NT2RM4 | | | NT2 | | pME18SFL3 |
| L3826 | NT2RP1 | | | NT2 | | pUC19FL3 |
| L3827 | NT2RP2 | | | NT2 | | pME18SFL3 |
| L3828 | NT2RP3 | | | NT2 | | pME18SFL3 |
| L3832 | PLACE1 | placenta | | | | pME18SFL3 |
| L3833 | PLACE2 | placenta | | | | pME18SFL3 |
| L3872 | NCI_CGAP_Skn1 | | skin, normal, 4 | | | pCMV- |
| | | | | | | SPORT6 |
| | | | pooled sa | | | |
| L3904 | NCI_CGAP_Brn64 | glioblastoma with EGFR | brain | | | pCMV- |
| | | | | | | SPORT6 |
| | | amplification | | | | |
| L3905 | NCI_CGAP_Brn67 | anaplastic oligodendroglioma | brain | | | pCMV- |
| | | with 1p/19q loss | | | | SPORT6 |
| L4500 | NCI_CGAP_HN16 | moderate to poorly | mouth | | | pAMP10 |
| | | differentiated invasive | | | | |
| | | carcino | | | | |
| L4559 | NCI_CGAP_Thy3 | follicular carcinoma | thyroid | | | pCMV- |
| | | | | | | SPORT6 |
| L4560 | NCI_CGAP_Ut7 | tumor | uterus | | | pCMV- |
| | | | | | | SPORT6 |
| L4747 | NCI_CGAP_Brn41 | oligodendroglioma | brain | | | pT7T3D-Pac |
| | | | | | | (Pharmacia) |
| | | | | | | with a |
| | | | | | | modifie |
| | | | | | | d polylinker |
| L5565 | NCI_CGAP_Brn66 | glioblastoma with probably | brain | | | pCMV- |
| | | | | | | SPORT6 |
| | | TP53 | | | | |
| | | | | | | mutation |
| | | | | | | and witho |
| L5566 | NCI_CGAP_Brn70 | anaplastic oligodendroglioma | brain | | | pCMV- |
| | | | | | | SPORT6.ccdb |
| L5568 | NCI_CGAP_HN21 | nasopharyngeal carcinoma | head/neck | | | pAMP1 |
| L5569 | NCI_CGAP_HN17 | normal epithelium | nasopharynx | | | pAMP10 |
| L5574 | NCI_CGAP_HN19 | normal epithelium | nasopharynx | | | pAMP10 |
| L5575 | NCI_CGAP_Brn65 | glioblastoma without EGFR | brain | | | pCMV- |
| | | | | | | SPORT6 |
| | | amplification | | | | |
| L5622 | NCI_CGAP_Skn3 | | skin | | | pCMV- |
| | | | | | | SPORT6 |
| L5623 | NCI_CGAP_Skn4 | squamous cell carcinoma | skin | | | pCMV- |
| | | | | | | SPORT6 |

Description of Table 5

[0154] Table 5 provides a key to the OMIM reference identification numbers disclosed in Table 1B.1, column 9. OMIM reference identification numbers (Column 1) were derived from Online Mendelian Inheritance in Man (Online Mendelian Inheritance in Man, OMIM. McKusick-Nathans Institute for Genetic Medicine, Johns Hopkins University (Baltimore, Md.) and National Center for Biotechnology Information, National Library of Medicine, (Bethesda, Md.) 2000. World Wide Web URL: http://www.ncbi.nlm.nih.gov/omim/. Column 2 provides diseases associated with the cytologic band disclosed in Table 1B.1, column 8, as determined using the Morbid Map database.

TABLE 5

| OMIM | |
|---|---|
| Reference | Description |
| 104311 | Alzheimer disease-3 |
| 106180 | Myocardial infarction, susceptibility to |
| 107300 | Antithrombin III deficiency |
| 108725 | Atherosclerosis, susceptibility to |
| 109150 | Machado-Joseph disease |
| 112410 | Hypertension with brachydactyly |
| 114400 | Lynch cancer family syndrome II |
| 114835 | Monocyte carboxyesterase deficiency |
| 116806 | Colorectal cancer |
| 116860 | Cavernous angiomatous malformations |
| 118800 | Choreoathetosis, familial paroxysmal |
| 120700 | C3 deficiency |
| 120950 | C8 deficiency, type I |
| 120960 | C8 deficiency, type II |
| 123000 | Craniometaphyseal dysplasia |
| 123620 | Cataract, cerulean, type 2, 601547 |
| 123660 | Cataract, Coppock-like |
| 125660 | Myopathy, desminopathic |
| 125660 | Cardiomyopathy |
| 126451 | Schizophrenia, susceptibility to |
| 126650 | Chloride diarrhea, congenital, Finnish type, 214700 |
| 126650 | Colon cancer |
| 129900 | EEC syndrome-1 |
| 131210 | Atherosclerosis, susceptibility to |
| 132700 | Cylindromatosis |
| 133171 | [Erythrocytosis, familial], 133100 |
| 133450 | Neuroepithelioma |
| 133450 | Ewing sarcoma |
| 135700 | Fibrosis of extraocular muscles, congenital, 1 |
| 136132 | [Fish-odor syndrome], 602079 |
| 138079 | Hyperinsulinism, familial, 602485 |
| 138079 | MODY, type 2, 125851 |
| 138130 | Hyperinsulinism-hyperammonemia syndrome |
| 138140 | Glucose transport defect, blood-brain barrier |
| 138300 | Hemolytic anemia due to glutathione reductase deficiency |
| 138700 | [Apolipoprotein H deficiency] |
| 139250 | Isolated growth hormone deficiency, Illig type with absent GH |
| | and Kowarski type with bioinactive GH |
| 143890 | Hypercholesterolemia, familial |
| 145001 | Hyperparathyroidism-jaw tumor syndrome |
| 147670 | Rabson-Mendenhall syndrome |
| 147670 | Diabetes mellitus, insulin-resistant, with acanthosis nigricans |
| 147670 | Leprechaunism |
| 150200 | [Placental lactogen deficiency] |
| 150250 | Larsen syndrome, autosomal dominant |
| 151440 | Leukemia, T-cell acute lymphoblastoid |
| 153880 | Macular dystrophy, dominant cystoid |
| 154275 | Malignant hyperthermia susceptibility 2 |
| 154276 | Malignant hyperthermia susceptibility 3 |
| 157640 | PEO with mitochondrial DNA deletions, type 1 |
| 157900 | Moebius syndrome |
| 164500 | Spinocerebellar ataxia-7 |
| 164953 | Liposarcoma |
| 165240 | Pallister-Hall syndrome, 146510 |
| 165240 | Postaxial polydactyly type A1, 174200 |
| 165240 | Greig cephalopolysyndactyly syndrome, 175700 |
| 168468 | Metaphyseal chondrodysplasia, Murk Jansen type, 156400 |
| 168470 | Humoral hypercalcemia of malignancy |
| 170500 | Myotonia congenita, atypical acetazolamide-responsive |
| 170500 | Paramyotonia congenita, 168300 |
| 170500 | Hyperkalemic periodic paralysis |
| 172490 | Phosphorylase kinase deficiency of liver and muscle, 261750 |
| 173360 | Thrombophilia due to excessive plasminogen activator |
| | inhibitor |
| 173360 | Hemorrhagic diathesis due to PAI1 deficiency |
| 173610 | Platelet alpha/delta storage pool deficiency |
| 174900 | Polyposis, juvenile intestinal |
| 176960 | Pituitary tumor, invasive |
| 178300 | Ptosis, hereditary congenital, 1 |
| 180104 | Retinitis pigmentosa-9 |
| 180105 | Retinitis pigmentosa-10 |
| 180297 | Anemia, hemolytic, Rh-null, suppressor type, 268150 |
| 181430 | Scapuloperoneal syndrome, myopathic type |
| 182280 | Small-cell cancer of lung |
| 182600 | Spastic paraplegia-3A |
| 187040 | Leukemia-1, T-cell acute lymphoblastic |
| 190900 | Colorblindness, tritan |
| 192340 | Diabetes insipidus, neurohypophyseal, 125700 |
| 193500 | Rhabdomyosarcoma, alveolar, 268220 |
| 193500 | Waardenburg syndrome, type I |
| 193500 | Waardenburg syndrome, type III, 148820 |
| 193500 | Craniofacial-deafness-hand syndrome, 122880 |
| 200990 | Acrocallosal syndrome |
| 201460 | Acyl-CoA dehydrogenase, long chain, deficiency of |
| 203300 | Hermansky-Pudlak syndrome |
| 203740 | Alpha-ketoglutarate dehydrogenase deficiency |
| 205100 | Amyotrophic lateral sclerosis, juvenile |
| 212138 | Carnitine-acylcarnitine translocase deficiency |
| 219800 | Cystinosis, nephropathic |
| 222800 | Hemolytic anemia due to bisphosphoglycerate mutase |
| | deficiency |
| 231670 | Glutaricaciduria, type I |
| 232300 | Glycogen storage disease II |
| 233700 | Chronic granulomatous disease due to deficiency of NCF-1 |
| 234200 | Neurodegeneration with brain iron accumulation |
| 236730 | Urofacial syndrome |
| 237300 | Carbamoylphosphate synthetase I deficiency |
| 240400 | Scurvy |
| 245200 | Krabbe disease |
| 246900 | Lipoamide dehydrogenase deficiency |
| 248611 | Maple syrup urine disease, type Ib |
| 249000 | Meckel syndrome |
| 249270 | Thiamine-responsive megaloblastic anemia |
| 251000 | Methylmalonicaciduria, mutase deficiency type |
| 252900 | Sanfilippo syndrome, type A |
| 253250 | Mulibrey nanism |
| 257220 | Niemann-Pick disease, type C |
| 257220 | Niemann-Pick disease, type D, 257250 |
| 261670 | Myopathy due to phosphoglycerate mutase deficiency |
| 262000 | Bjornstad syndrome |
| 263200 | Polycystic kidney disease, autosomal recessive |
| 277730 | Wernicke-Korsakoff syndrome, susceptibility to |
| 600079 | Colon cancer |
| 600101 | Deafness, autosomal dominant 2 |
| 600163 | Long QT syndrome-3 |
| 600185 | Pancreatic cancer |
| 600185 | Breast cancer 2, early onset |
| 600211 | Cleidocranial dysplasia, 119600 |
| 600266 | Resistance/susceptibility to TB, etc. |
| 600276 | Cerebral arteriopathy with subcortical infarcts and |
| | leukoencephalopathy, 125310 |
| 600512 | Epilepsy, partial |
| 600650 | Myopathy due to CPT II deficiency, 255110 |
| 600650 | CPT deficiency, hepatic, type II, 600649 |
| 600698 | Salivary adenoma |
| 600698 | Uterine leiomyoma |
| 600698 | Lipoma |
| 600698 | Lipomatosis, mutiple, 151900 |
| 600701 | Lipoma |
| 600722 | Ceroid lipofuscinosis, neuronal, variant juvenile type, |
| | with granular osmiophilic deposits |
| 600722 | Ceroid lipofuscinosis, neuronal-1, infantile, 256730 |
| 600808 | Enuresis, nocturnal, 2 |
| 600850 | Schizophrenia disorder-4 |
| 600882 | Charcot-Marie-Tooth neuropathy-2B |
| 600957 | Persistent Mullerian duct syndrome, type I, 261550 |
| 600968 | Gitelman syndrome, 263800 |
| 600971 | Deafness, autosomal recessive 6 |
| 601208 | Insulin-dependent diabetes mellitus-11 |
| 601226 | Progressive external ophthalmoplegia, type 2 |
| 601277 | Ichthyosis, lamellar, type 2 |
| 601649 | Blepharophimosis, epicanthus inversus, and ptosis, type 2 |
| 601652 | Glaucoma 1A, primary open angle, juvenile-onset, 137750 |
| 601669 | Hirschsprung disease, one form |
| 601690 | Platelet-activating factor acetylhydrolase deficiency |
| 601728 | Bannayan-Zonana syndrome, 153480 |
| 601728 | Cowden disease, 158350 |
| 601728 | Endometrial carcinoma |
| 601728 | Lhermitte-Duclos syndrome |
| 601843 | Hypothyroidism, congenital, 274400 |
| 602116 | Glioma |
| 602136 | Refsum disease, infantile, 266510 |
| 602136 | Zellweger syndrome-1, 214100 |
| 602136 | Adrenoleukodystrophy, neonatal, 202370 |
| 602447 | Coronary artery disease, susceptibility to |
| 602568 | Homocystinuria-megaloblastic anemia, cbl E type, 236270 |
| 602629 | Dystonia-6, torsion |

Mature Polypeptides

[0155] The present invention also encompasses mature forms of a polypeptide having the amino acid sequence of SEQ ID NO:Y and/or the amino acid sequence encoded by the cDNA in a deposited clone. Polynucleotides encoding the mature forms (such as, for example, the polynucleotide sequence in SEQ ID NO:X and/or the polynucleotide sequence contained in the cDNA of a deposited clone) are also encompassed by the invention. Moreover, fragments or variants of these polypeptides (such as, fragments as described herein, polypeptides at least 80%, 85%, 90%, 95%, 96%, 97%, 98%, 99%, or 100% identical to these polypeptides, or polypeptides encoded by a polynucleotide that hybridizes under stringent conditions to the complementary strand the polynucleotide encoding these polypeptides) are also encompassed by the invention. In preferred embodiments, these fragments or variants retain one or more functional acitivities of the full-length or mature form of the polypeptide (e.g., biological activity (such as, for example, activity useful in detecting, preventing, diagnosing, prognosticating, treating, and/or ameliorating allergic and/or asthmatic disorders), antigenicity (ability to bind, or compete with a polypeptide of the invention for binding, to an anti-polypeptide of the invention antibody), immunogenicity (ability to generate antibody which binds to a specific polypeptide of the invention), ability to form multimers with polypeptides of the invention, and ability to bind to a receptor or ligand for a polypeptide of the invention). Antibodies that bind the polypeptides of the invention, and polynucleotides encoding these polypeptides are also encompassed by the invention.

[0156] According to the signal hypothesis, proteins secreted by mammalian cells have a signal or secretary leader sequence that is cleaved from the mature protein once export of the growing protein chain across the rough endoplasmic reticulum has been initiated. Most mammalian cells and even insect cells cleave secreted proteins with the same specificity. However, in some cases, cleavage of a secreted protein is not entirely uniform, which results in two or more mature species of the protein. Further, it has long been known that cleavage specificity of a secreted protein is ultimately determined by the primary structure of the complete protein, that is, it is inherent in the amino acid sequence of the polypeptide.

[0157] Methods for predicting whether a protein has a signal sequence, as well as the cleavage point for that sequence, are available. For instance, the method of McGeoch, Virus Res. 3:271-286 (1985), uses the information from a short N-terminal charged region and a subsequent uncharged region of the complete (uncleaved) protein. The method of von Heinje, Nucleic Acids Res. 14:4683-4690 (1986) uses the information from the residues surrounding the cleavage site, typically residues −13 to +2, where +1 indicates the amino terminus of the secreted protein. The accuracy of predicting the cleavage points of known mammalian secretory proteins for each of these methods is in the range of 75-80%. (von Heinje, supra.) However, the two methods do not always produce the same predicted cleavage point(s) for a given protein.

[0158] In the present case, the deduced amino acid sequence of the secreted polypeptide was analyzed by a computer program called SignalP (Henrik Nielsen et al., Protein Engineering 10:1-6 (1997)), which predicts the cellular location of a protein based on the amino acid sequence. As part of this computational prediction of localization, the methods of McGeoch and von Heinje are incorporated. The analysis of the amino acid sequences of the secreted proteins described herein by this program provided the results shown in Table 1A.

[0159] In specific embodiments, polypeptides of the invention comprise, or alternatively consist of, the predicted mature form of the polypeptide as delineated in columns 14 and 15 of Table 1A. Moreover, fragments or variants of these polypeptides (such as, fragments as described herein, polypeptides at least 80%, 85%, 90%, 95%, 96%, 97%, 98%, 99%, or 100% identical to these polypeptides, or polypeptides encoded by a polynucleotide that hybridizes under stringent conditions to the complementary strand of the polynucleotide encoding these polypeptides) are also encompassed by the invention. In preferred embodiments, these fragments or variants retain one or more functional acitivities of the full-length or mature form of the polypeptide (e.g., biological activity (such as, for example, activity useful in detecting, preventing, diagnosing, prognosticating, treating, and/or ameliorating allergic and/or asthmatic disorders), antigenicity (ability to bind, or compete with a polypeptide of the invention for binding, to an anti-polypeptide of the invention antibody), immunogenicity (ability to generate antibody which binds to a specific polypeptide of the invention), ability to form multimers with polypeptides of the invention, and ability to bind to a receptor or ligand for a polypeptide of the invention). Antibodies that bind the polypeptides of the invention, and polynucleotides encoding these polypeptides are also encompassed by the invention.

[0160] Polynucleotides encoding proteins comprising, or consisting of, the predicted mature form of polypeptides of the invention (e.g., polynucleotides having the sequence of SEQ ID NO: X (Table 1A, column 4), the sequence delineated in columns 7 and 8 of Table 1A, and a sequence encoding the mature polypeptide delineated in columns 14 and 15 of Table 1A (e.g., the sequence of SEQ ID NO:X encoding the mature polypeptide delineated in columns 14 and 15 of Table 1)) are also encompassed by the invention, as are fragments or variants of these polynucleotides (such as, fragments as described herein, polynucleotides at least 80%, 85%, 90%, 95%, 96%, 97%, 98%, 99%, or 100% identical to these polyncueotides, and nucleic acids which hybridizes under stringent conditions to the complementary strand of the polynucleotide).

[0161] As one of ordinary skill would appreciate, however, cleavage sites sometimes vary from organism to organism and cannot be predicted with absolute certainty. Accordingly, the present invention provides secreted polypeptides having a sequence shown in SEQ ID NO:Y which have an N-terminus beginning within 15 residues of the predicted cleavage point (i.e., having 1, 2, 3, 4, 5, 6, 7, 8, 9, 10, 11, 12, 13, 14, or 15 more or less contiguous residues of SEQ ID NO:Y at the N-terminus when compared to the predicted mature form of the polypeptide (e.g., the mature polypeptide delineated in columns 14 and 15 of Table 1). Similarly, it is also recognized that in some cases, cleavage of the signal sequence from a secreted protein is not entirely uniform, resulting in more than one secreted species. These polypeptides, and the polynucleotides encoding such polypeptides, are contemplated by the present invention.

[0162] Moreover, the signal sequence identified by the above analysis may not necessarily predict the naturally occurring signal sequence. For example, the naturally occurring signal sequence may be further upstream from the predicted signal sequence. However, it is likely that the predicted signal sequence will be capable of directing the secreted protein to the ER. Nonetheless, the present invention provides the mature protein produced by expression of the polynucleotide sequence of SEQ ID NO:X and/or the polynucleotide sequence contained in the cDNA of a deposited clone, in a mammalian cell (e.g., COS cells, as desribed below). These polypeptides, and the polynucleotides encoding such polypeptides, are contemplated by the present invention.

Polynucleotide and Polypeptide Variants

[0163] The present invention is also directed to variants of the polynucleotide sequence disclosed in SEQ ID NO:X or the complementary strand thereto, nucleotide sequences encoding the polypeptide of SEQ ID NO:Y, the nucleotide sequence of SEQ ID NO:X that encodes the polypeptide sequence as defined in columns 13 and 14 of Table 1A, nucleotide sequences encoding the polypeptide sequence as defined in columns 13 and 14 of Table 1A, the nucleotide sequence of SEQ ID NO:X encoding the polypeptide sequence as defined in Table 1B, nucleotide sequences encoding the polypeptide as defined in Table 1B, the nucleotide sequence as defined in columns 8 and 9 of Table 2, nucleotide sequences encoding the polypeptide encoded by the nucleotide sequence as defined in columns 8 and 9 of Table 2, the nucleotide sequence as defined in column 6 of Table 1C, nucleotide sequences encoding the polypeptide encoded by the nucleotide sequence as defined in column 6 of Table 1C, the cDNA sequence contained in ATCC Deposit No: Z, nucleotide sequences encoding the polypeptide encoded by the cDNA sequence contained in ATCC Deposit No: Z, and/or nucleotide sequences encoding a mature (secreted) polypeptide encoded by the cDNA sequence contained in ATCC Deposit No: Z.

[0164] The present invention also encompasses variants of the polypeptide sequence disclosed in SEQ ID NO:Y, the polypeptide as defined in columns 13 and 14 of Table 1A, the polypeptide sequence as defined in Table 1B, a polypeptide sequence encoded by the polynucleotide sequence in SEQ ID NO:X, a polypeptide sequence encoded by the nucleotide sequence as defined in columns 8 and 9 of Table 2, a polypeptide sequence encoded by the nucleotide sequence as defined in column 6 of Table 1C, a polypeptide sequence encoded by the complement of the polynucleotide sequence in SEQ ID NO:X, the polypeptide sequence encoded by the cDNA sequence contained in ATCC Deposit No: Z and/or a mature (secreted) polypeptide encoded by the cDNA sequence contained in ATCC Deposit No: Z.

[0165] “Variant” refers to a polynucleotide or polypeptide differing from the polynucleotide or polypeptide of the present invention, but retaining essential properties thereof. Generally, variants are overall closely similar, and, in many regions, identical to the polynucleotide or polypeptide of the present invention.

[0166] Thus, one aspect of the invention provides an isolated nucleic acid molecule comprising, or alternatively consisting of, a polynucleotide having a nucleotide sequence selected from the group consisting of: (a) a nucleotide sequence described in SEQ ID NO:X or contained in the cDNA sequence of ATCC Deposit No: Z; (b) a nucleotide sequence in SEQ ID NO:X or the cDNA in ATCC Deposit No: Z which encodes the complete amino acid sequence of SEQ ID NO:Y or the complete amino acid sequence encoded by the cDNA in ATCC Deposit No: Z; (c) a nucleotide sequence in SEQ ID NO:X or the cDNA in ATCC Deposit No: Z which encodes a mature polypeptide (i.e., a secreted polypeptide (e.g., as delineated in columns 14 and 15 of Table 1A)); (d) a nucleotide sequence in SEQ ID NO:X or the cDNA sequence of ATCC Deposit No: Z, which encodes a biologically active fragment of a polypeptide; (e) a nucleotide sequence in SEQ ID NO:X or the cDNA sequence of ATCC Deposit No: Z, which encodes an antigenic fragment of a polypeptide; (f) a nucleotide sequence encoding a polypeptide comprising the complete amino acid sequence of SEQ ID NO:Y or the complete amino acid sequence encoded by the cDNA in ATCC Deposit No: Z; (g) a nucleotide sequence encoding a mature polypeptide of the amino acid sequence of SEQ ID NO:Y (i.e., a secreted polypeptide (e.g., as delineated in columns 14 and 15 of Table 1A)) or a mature polypeptide of the amino acid sequence encoded by the cDNA in ATCC Deposit No: Z; (h) a nucleotide sequence encoding a biologically active fragment of a polypeptide having the complete amino acid sequence of SEQ ID NO:Y or the complete amino acid sequence encoded by the cDNA in ATCC Deposit No: Z; (i) a nucleotide sequence encoding an antigenic fragment of a polypeptide having the complete amino acid sequence of SEQ ID NO:Y or the complete amino acid sequence encoded by the cDNA in ATCC Deposit No: Z; and (j) a nucleotide sequence complementary to any of the nucleotide sequences in (a), (b), (c), (d), (e), (f), (g), (h), or (i) above.

[0167] The present invention is also directed to nucleic acid molecules which comprise, or alternatively consist of, a nucleotide sequence which is at least 80%, 85%, 90%, 95%, 96%, 97%, 98%, 99% or 100%, identical to, for example, any of the nucleotide sequences in (a), (b), (c), (d), (e), (f), (g), (h), (i), or (j) above, the nucleotide coding sequence in SEQ ID NO:X or the complementary strand thereto, the nucleotide coding sequence of the cDNA contained in ATCC Deposit No: Z or the complementary strand thereto, a nucleotide sequence encoding the polypeptide of SEQ ID NO:Y, a nucleotide sequence encoding a polypeptide sequence encoded by the nucleotide sequence in SEQ ID NO:X, a polypeptide sequence encoded by the complement of the polynucleotide sequence in SEQ ID NO:X, a nucleotide sequence encoding the polypeptide encoded by the cDNA contained in ATCC Deposit No: Z, the nucleotide coding sequence in SEQ ID NO:X as defined in columns 8 and 9 of Table 2 or the complementary strand thereto, a nucleotide sequence encoding the polypeptide encoded by the nucleotide sequence in SEQ ID NO:X as defined in columns 8 and 9 of Table 2 or the complementary strand thereto, the nucleotide coding sequence in SEQ ID NO:B as defined in column 6 of Table 1C or the complementary strand thereto, a nucleotide sequence encoding the polypeptide encoded by the nucleotide sequence in SEQ ID NO:B as defined in column 6 of Table 1C or the complementary strand thereto, the nucleotide sequence in SEQ ID NO:X encoding the polypeptide sequence as defined in Table 1B or the complementary strand thereto, nucleotide sequences encoding the polypeptide as defined in Table 1B or the complementary strand thereto, and/or polynucleotide fragments of any of these nucleic acid molecules (e.g., those fragments described herein). Polynucleotides that hybridize to the complement of these nucleic acid molecules under stringent hybridization conditions or alternatively, under lower stringency conditions, are also encompassed by the invention, as are polypeptides encoded by these polynucleotides and nucleic acids.

[0168] In a preferred embodiment, the invention encompasses nucleic acid molecules which comprise, or alternatively, consist of a polynucleotide which hybridizes under stringent hybridization conditions, or alternatively, under lower stringency conditions, to a polynucleotide in (a), (b), (c), (d), (e), (f), (g), (h), or (i), above, as are polypeptides encoded by these polynucleotides. In another preferred embodiment, polynucleotides which hybridize to the complement of these nucleic acid molecules under stringent hybridization conditions, or alternatively, under lower stringency conditions, are also encompassed by the invention, as are polypeptides encoded by these polynucleotides.

[0169] In another embodiment, the invention provides a purified protein comprising, or alternatively consisting of, a polypeptide having an amino acid sequence selected from the group consisting of: (a) the complete amino acid sequence of SEQ ID NO:Y or the complete amino acid sequence encoded by the cDNA in ATCC Deposit No: Z; (b) the amino acid sequence of a mature (secreted) form of a polypeptide having the amino acid sequence of SEQ ID NO:Y (e.g., as delineated in columns 14 and 15 of Table 1A) or a mature form of the amino acid sequence encoded by the cDNA in ATCC Deposit No: Z mature; (c) the amino acid sequence of a biologically active fragment of a polypeptide having the complete amino acid sequence of SEQ ID NO:Y or the complete amino acid sequence encoded by the cDNA in ATCC Deposit No: Z; and (d) the amino acid sequence of an antigenic fragment of a polypeptide having the complete amino acid sequence of SEQ ID NO:Y or the complete amino acid sequence encoded by the cDNA in ATCC Deposit No: Z.

[0170] The present invention is also directed to proteins which comprise, or alternatively consist of, an amino acid sequence which is at least 80%, 85%, 90%, 95%, 96%, 97%, 98%, 99% or 100%, identical to, for example, any of the amino acid sequences in (a), (b), (c), or (d), above, the amino acid sequence shown in SEQ ID NO:Y, the amino acid sequence encoded by the cDNA contained in ATCC Deposit No: Z, the amino acid sequence of the polypeptide encoded by the nucleotide sequence in SEQ ID NO:X as defined in columns 8 and 9 of Table 2, the amino acid sequence of the polypeptide encoded by the nucleotide sequence in SEQ ID NO:B as defined in column 6 of Table 1C, the amino acid sequence as defined in Table 1B, an amino acid sequence encoded by the nucleotide sequence in SEQ ID NO:X, and an amino acid sequence encoded by the complement of the polynucleotide sequence in SEQ ID NO:X. Fragments of these polypeptides are also provided (e.g., those fragments described herein). Further proteins encoded by polynucleotides that hybridize to the complement of the nucleic acid molecules encoding these amino acid sequences under stringent hybridization conditions or alternatively, under lower stringency conditions, are also encompassed by the invention, as are the polynucleotides encoding these proteins.

[0171] By a nucleic acid having a nucleotide sequence at least, for example, 95% “identical” to a reference nucleotide sequence of the present invention, it is intended that the nucleotide sequence of the nucleic acid is identical to the reference sequence except that the nucleotide sequence may include up to five point mutations per each 100 nucleotides of the reference nucleotide sequence encoding the polypeptide. In other words, to obtain a nucleic acid having a nucleotide sequence at least 95% identical to a reference nucleotide sequence, up to 5% of the nucleotides in the reference sequence may be deleted or substituted with another nucleotide, or a number of nucleotides up to 5% of the total nucleotides in the reference sequence may be inserted into the reference sequence. The query sequence may be an entire sequence referred to in Table 1B or 2 as the ORF (open reading frame), or any fragment specified as described herein.

[0172] As a practical matter, whether any particular nucleic acid molecule or polypeptide is at least 80%, 85%, 90%, 95%, 96%, 97%, 98% or 99% identical to a nucleotide sequence of the present invention can be determined conventionally using known computer programs. A preferred method for determining the best overall match between a query sequence (a sequence of the present invention) and a subject sequence, also referred to as a global sequence alignment, can be determined using the FASTDB computer program based on the algorithm of Brutlag et al. (Comp. App. Biosci. 6:237-245 (1990)). In a sequence alignment the query and subject sequences are both DNA sequences. An RNA sequence can be compared by converting U's to T's. The result of said global sequence alignment is expressed as percent identity. Preferred parameters used in a FASTDB alignment of DNA sequences to calculate percent identity are: Matrix=Unitary, k-tuple=4, Mismatch Penalty=1, Joining Penalty=30, Randomization Group Length=0, Cutoff Score=1, Gap Penalty=5, Gap Size Penalty 0.05, Window Size=500 or the length of the subject nucleotide sequence, whichever is shorter.

[0173] If the subject sequence is shorter than the query sequence because of 5′ or 3′ deletions, not because of internal deletions, a manual correction must be made to the results. This is because the FASTDB program does not account for 5′ and 3′ truncations of the subject sequence when calculating percent identity. For subject sequences truncated at the 5′ or 3′ ends, relative to the query sequence, the percent identity is corrected by calculating the number of bases of the query sequence that are 5′ and 3′ of the subject sequence, which are not matched/aligned, as a percent of the total bases of the query sequence. Whether a nucleotide is matched/aligned is determined by results of the FASTDB sequence alignment. This percentage is then subtracted from the percent identity, calculated by the above FASTDB program using the specified parameters, to arrive at a final percent identity score. This corrected score is what is used for the purposes of the present invention. Only bases outside the 5′ and 3′ bases of the subject sequence, as displayed by the FASTDB alignment, which are not matched/aligned with the query sequence, are calculated for the purposes of manually adjusting the percent identity score.

[0174] For example, a 90 base subject sequence is aligned to a 100 base query sequence to determine percent identity. The deletions occur at the 5′ end of the subject sequence and therefore, the FASTDB alignment does not show a matched/alignment of the first 10 bases at 5′ end. The 10 unpaired bases represent 10% of the sequence (number of bases at the 5′ and 3′ ends not matched/total number of bases in the query sequence) so 10% is subtracted from the percent identity score calculated by the FASTDB program. If the remaining 90 bases were perfectly matched the final percent identity would be 90%. In another example, a 90 base subject sequence is compared with a 100 base query sequence. This time the deletions are internal deletions so that there are no bases on the 5′ or 3′ of the subject sequence that are not matched/aligned with the query. In this case the percent identity calculated by FASTDB is not manually corrected. Once again, only bases 5′ and 3′ of the subject sequence which are not matched/aligned with the query sequence are manually corrected for. No other manual corrections are to be made for the purposes of the present invention.

[0175] By a polypeptide having an amino acid sequence at least, for example, 95% “identical” to a query amino acid sequence of the present invention, it is intended that the amino acid sequence of the subject polypeptide is identical to the query sequence except that the subject polypeptide sequence may include up to five amino acid alterations per each 100 amino acids of the query amino acid sequence. In other words, to obtain a polypeptide having an amino acid sequence at least 95% identical to a query amino acid sequence, up to 5% of the amino acid residues in the subject sequence may be inserted, deleted, (indels) or substituted with another amino acid. These alterations of the reference sequence may occur at the amino or carboxy terminal positions of the reference amino acid sequence or anywhere between those terminal positions, interspersed either individually among residues in the reference sequence or in one or more contiguous groups within the reference sequence.

[0176] As a practical matter, whether any particular polypeptide is at least 80%, 85%, 90%, 95%, 96%, 97%, 98% or 99% identical to, for instance, the amino acid sequence of a polypeptide referred to in Table 1A (e.g., the amino acid sequence delineated in columns 14 and 15) or a fragment thereof, Table 1B.1 (e.g., the amino acid sequence identified in column 6) or a fragment thereof, Table 2 (e.g., the amino acid sequence of the polypeptide encoded by the polynucleotide sequence defined in columns 8 and 9 of Table 2) or a fragment thereof, the amino acid sequence of the polypeptide encoded by the polynucleotide sequence in SEQ ID NO:B as defined in column 6 of Table 1C or a fragment thereof, the amino acid sequence of the polypeptide encoded by the nucleotide sequence in SEQ ID NO:X or a fragment thereof, or the amino acid sequence of the polypeptide encoded by cDNA contained in ATCC Deposit No: Z, or a fragment thereof, the amino acid sequence of a mature (secreted) polypeptide encoded by cDNA contained in ATCC Deposit No: Z, or a fragment thereof, can be determined conventionally using known computer programs. A preferred method for determining the best overall match between a query sequence (a sequence of the present invention) and a subject sequence, also referred to as a global sequence alignment, can be determined using the FASTDB computer program based on the algorithm of Brutlag et al. (Comp. App. Biosci. 6:237-245 (1990)). In a sequence alignment the query and subject sequences are either both nucleotide sequences or both amino acid sequences. The result of said global sequence alignment is expressed as percent identity. Preferred parameters used in a FASTDB amino acid alignment are: Matrix=PAM 0, k-tuple=2, Mismatch Penalty=1, Joining Penalty=20, Randomization Group Length=0, Cutoff Score=1, Window Size=sequence length, Gap Penalty=5, Gap Size Penalty=0.05, Window Size=500 or the length of the subject amino acid sequence, whichever is shorter.

[0177] If the subject sequence is shorter than the query sequence due to N- or C-terminal deletions, not because of internal deletions, a manual correction must be made to the results. This is because the FASTDB program does not account for N- and C-terminal truncations of the subject sequence when calculating global percent identity. For subject sequences truncated at the N- and C-termini, relative to the query sequence, the percent identity is corrected by calculating the number of residues of the query sequence that are N- and C-terminal of the subject sequence, which are not matched/aligned with a corresponding subject residue, as a percent of the total bases of the query sequence. Whether a residue is matched/aligned is determined by results of the FASTDB sequence alignment. This percentage is then subtracted from the percent identity, calculated by the above FASTDB program using the specified parameters, to arrive at a final percent identity score. This final percent identity score is what is used for the purposes of the present invention. Only residues to the N- and C-termini of the subject sequence, which are not matched/aligned with the query sequence, are considered for the purposes of manually adjusting the percent identity score. That is, only query residue positions outside the farthest N- and C-terminal residues of the subject sequence.

[0178] For example, a 90 amino acid residue subject sequence is aligned with a 100 residue query sequence to determine percent identity. The deletion occurs at the N-terminus of the subject sequence and therefore, the FASTDB alignment does not show a matching/alignment of the first 10 residues at the N-terminus. The 10 unpaired residues represent 10% of the sequence (number of residues at the N- and C-termini not matched/total number of residues in the query sequence) so 10% is subtracted from the percent identity score calculated by the FASTDB program. If the remaining 90 residues were perfectly matched the final percent identity would be 90%. In another example, a 90 residue subject sequence is compared with a 100 residue query sequence. This time the deletions are internal deletions so there are no residues at the N- or C-termini of the subject sequence that are not matched/aligned with the query. In this case the percent identity calculated by FASTDB is not manually corrected. Once again, only residue positions outside the N- and C-terminal ends of the subject sequence, as displayed in the FASTDB alignment, which are not matched/aligned with the query sequnce are manually corrected for. No other manual corrections are to be made for the purposes of the present invention.

[0179] The polynucleotide variants of the invention may contain alterations in the coding regions, non-coding regions, or both. Especially preferred are polynucleotide variants containing alterations that produce silent substitutions, additions, or deletions, but do not alter the properties or activities of the encoded polypeptide. Nucleotide variants produced by silent substitutions due to the degeneracy of the genetic code are preferred. Moreover, polypeptide variants in which less than 50, less than 40, less than 30, less than 20, less than 10, or 5-50, 5-25, 5-10, 1-5, or 1-2 amino acids are substituted, deleted, or added in any combination are also preferred. Polynucleotide variants can be produced for a variety of reasons, e.g., to optimize codon expression for a particular host (change codons in the human mRNA to those preferred by a bacterial host such as E. coli).

[0180] Naturally occurring variants are called “allelic variants,” and refer to one of several alternate forms of a gene occupying a given locus on a chromosome of an organism. (Genes II, Lewin, B., ed., John Wiley & Sons, New York (1985)). These allelic variants can vary at either the polynucleotide and/or polypeptide level and are included in the present invention. Alternatively, non-naturally occurring variants may be produced by mutagenesis techniques or by direct synthesis.

[0181] Using known methods of protein engineering and recombinant DNA technology, variants may be generated to improve or alter the characteristics of the polypeptides of the present invention. For instance, one or more amino acids can be deleted from the N-terminus or C-terminus of the polypeptide of the present invention without substantial loss of biological function. As an example, Ron et al. (J. Biol. Chem. 268: 2984-2988 (1993)) reported variant KGF proteins having heparin binding activity even after deleting 3, 8, or 27 amino-terminal amino acid residues. Similarly, Interferon gamma exhibited up to ten times higher activity after deleting 8-10 amino acid residues from the carboxy terminus of this protein. (Dobeli et al., J. Biotechnology 7:199-216 (1988).)

[0182] Moreover, ample evidence demonstrates that variants often retain a biological activity similar to that of the naturally occurring protein. For example, Gayle and coworkers (J. Biol. Chem. 268:22105-22111 (1993)) conducted extensive mutational analysis of human cytokine IL-1a. They used random mutagenesis to generate over 3,500 individual IL-1a mutants that averaged 2.5 amino acid changes per variant over the entire length of the molecule. Multiple mutations were examined at every possible amino acid position. The investigators found that “[m]ost of the molecule could be altered with little effect on either [binding or biological activity].” In fact, only 23 unique amino acid sequences, out of more than 3,500 nucleotide sequences examined, produced a protein that significantly differed in activity from wild-type.

[0183] Furthermore, even if deleting one or more amino acids from the N-terminus or C-terminus of a polypeptide results in modification or loss of one or more biological functions, other biological activities may still be retained. For example, the ability of a deletion variant to induce and/or to bind antibodies which recognize the secreted form will likely be retained when less than the majority of the residues of the secreted form are removed from the N-terminus or C-terminus. Whether a particular polypeptide lacking N- or C-terminal residues of a protein retains such immunogenic activities can readily be determined by routine methods described herein and otherwise known in the art.

[0184] Thus, the invention further includes polypeptide variants that show a biological or functional activity of the polypeptides of the invention (such as, for example, activity useful in detecting, preventing, diagnosing, prognosticating, treating, and/or ameliorating allergic and/or asthmatic disorders). Such variants include deletions, insertions, inversions, repeats, and substitutions selected according to general rules known in the art so as have little effect on activity.

[0185] The present application is directed to nucleic acid molecules at least 80%, 85%, 90%, 95%, 96%, 97%, 98%, 99% or 100% identical to the nucleic acid sequences disclosed herein, (e.g., encoding a polypeptide having the amino acid sequence of an N and/or C terminal deletion), irrespective of whether they encode a polypeptide having functional activity. This is because even where a particular nucleic acid molecule does not encode a polypeptide having functional activity, one of skill in the art would still know how to use the nucleic acid molecule, for instance, as a hybridization probe or a polymerase chain reaction (PCR) primer. Uses of the nucleic acid molecules of the present invention that do not encode a polypeptide having functional activity include, inter alia, (1) isolating a gene or allelic or splice variants thereof in a cDNA library; (2) in situ hybridization (e.g., “FISH”) to metaphase chromosomal spreads to provide precise chromosomal location of the gene, as described in Verma et al., Human Chromosomes: A Manual of Basic Techniques, Pergamon Press, New York (1988); (3) Northern Blot analysis for detecting mRNA expression in specific tissues (e.g., normal or diseased tissues); and (4) in situ hybridization (e.g., histochemistry) for detecting mRNA expression in specific tissues (e.g., normal or diseased tissues).

[0186] Preferred, however, are nucleic acid molecules having sequences at least 80%, 85%, 90%, 95%, 96%, 97%, 98%, 99% or 100% identical to the nucleic acid sequences disclosed herein, which do, in fact, encode a polypeptide having functional activity. By a polypeptide having “functional activity” is meant, a polypeptide capable of displaying one or more known functional activities associated with a full-length (complete) protein and/or a mature (secreted) protein of the invention. Such functional activities include, but are not limited to, biological activity (such as, for example, activity useful in detecting, preventing, diagnosing, prognosticating, treating, and/or ameliorating allergic and/or asthmatic diseases and disorders), antigenicity (ability to bind, or compete with a polypeptide of the invention for binding, to an anti-polypeptide of the invention antibody), immunogenicity (ability to generate antibody which binds to a specific polypeptide of the invention), ability to form multimers with polypeptides of the invention, and ability to bind to a receptor or ligand for a polypeptide of the invention.

[0187] The functional activity of the polypeptides, and fragments, variants and derivatives of the invention, can be assayed by various methods.

[0188] For example, in one embodiment where one is assaying for the ability to bind or compete with a full-length polypeptide of the present invention for binding to an anti-polypetide antibody, various immunoassays known in the art can be used, including but not limited to, competitive and non-competitive assay systems using techniques such as radioimmunoassays, ELISA (enzyme linked immunosorbent assay), “sandwich” immunoassays, immunoradiometric assays, gel diffusion precipitation reactions, immunodiffusion assays, in situ immunoassays (using colloidal gold, enzyme or radioisotope labels, for example), western blots, precipitation reactions, agglutination assays (e.g., gel agglutination assays, hemagglutination assays), complement fixation assays, immunofluorescence assays, protein A assays, and immunoelectrophoresis assays, etc. In one embodiment, antibody binding is detected by detecting a label on the primary antibody. In another embodiment, the primary antibody is detected by detecting binding of a secondary antibody or reagent to the primary antibody. In a further embodiment, the secondary antibody is labeled. Many means are known in the art for detecting binding in an immunoassay and are within the scope of the present invention.

[0189] In another embodiment, where a ligand is identified, or the ability of a polypeptide fragment, variant or derivative of the invention to multimerize is being evaluated, binding can be assayed, e.g., by means well-known in the art, such as, for example, reducing and non-reducing gel chromatography, protein affinity chromatography, and affinity blotting. See generally, Phizicky et al., Microbiol. Rev. 59:94-123 (1995). In another embodiment, the ability of physiological correlates of a polypeptide of the present invention to bind to a substrate(s) of the polypeptide of the invention can be routinely assayed using techniques known in the art.

[0190] In addition, assays described herein (see Examples) and otherwise known in the art may routinely be applied to measure the ability of polypeptides of the present invention and fragments, variants and derivatives thereof to elicit polypeptide related biological activity (either in vitro or in vivo). Other methods will be known to the skilled artisan and are within the scope of the invention.

[0191] Of course, due to the degeneracy of the genetic code, one of ordinary skill in the art will immediately recognize that a large number of the nucleic acid molecules having a sequence at least 80%, 85%, 90%, 95%, 96%, 97%, 98%, 99%, or 100% identical to, for example, the nucleic acid sequence of the cDNA contained in ATCC Deposit No: Z, the nucleic acid sequence referred to in Table 1B (SEQ ID NO:X), the nucleic acid sequence disclosed in Table 1A (e.g., the nucleic acid sequence delineated in columns 7 and 8), the nucleic acid sequence disclosed in Table 2 (e.g., the nucleic acid sequence delineated in columns 8 and 9) or fragments thereof, will encode polypeptides “having functional activity.” In fact, since degenerate variants of any of these nucleotide sequences all encode the same polypeptide, in many instances, this will be clear to the skilled artisan even without performing the above described comparison assay. It will be further recognized in the art that, for such nucleic acid molecules that are not degenerate variants, a reasonable number will also encode a polypeptide having functional activity. This is because the skilled artisan is fully aware of amino acid substitutions that are either less likely or not likely to significantly effect protein function (e.g., replacing one aliphatic amino acid with a second aliphatic amino acid), as further described below.

[0192] For example, guidance concerning how to make phenotypically silent amino acid substitutions is provided in Bowie et al., “Deciphering the Message in Protein Sequences: Tolerance to Amino Acid Substitutions,” Science 247:1306-1310 (1990), wherein the authors indicate that there are two main strategies for studying the tolerance of an amino acid sequence to change.

[0193] The first strategy exploits the tolerance of amino acid substitutions by natural selection during the process of evolution. By comparing amino acid sequences in different species, conserved amino acids can be identified. These conserved amino acids are likely important for protein function. In contrast, the amino acid positions where substitutions have been tolerated by natural selection indicates that these positions are not critical for protein function. Thus, positions tolerating amino acid substitution could be modified while still maintaining biological activity of the protein.

[0194] The second strategy uses genetic engineering to introduce amino acid changes at specific positions of a cloned gene to identify regions critical for protein function. For example, site directed mutagenesis or alanine-scanning mutagenesis (introduction of single alanine mutations at every residue in the molecule) can be used. See Cunningham and Wells, Science 244:1081-1085 (1989). The resulting mutant molecules can then be tested for biological activity.

[0195] As the authors state, these two strategies have revealed that proteins are surprisingly tolerant of amino acid substitutions. The authors further indicate which amino acid changes are likely to be permissive at certain amino acid positions in the protein. For example, most buried (within the tertiary structure of the protein) amino acid residues require nonpolar side chains, whereas few features of surface side chains are generally conserved. Moreover, tolerated conservative amino acid substitutions involve replacement of the aliphatic or hydrophobic amino acids Ala, Val, Leu and Ile; replacement of the hydroxyl residues Ser and Thr; replacement of the acidic residues Asp and Glu; replacement of the amide residues Asn and Gln, replacement of the basic residues Lys, Arg, and His; replacement of the aromatic residues Phe, Tyr, and Trp, and replacement of the small-sized amino acids Ala, Ser, Thr, Met, and Gly.

[0196] Besides conservative amino acid substitution, variants of the present invention include (i) substitutions with one or more of the non-conserved amino acid residues, where the substituted amino acid residues may or may not be one encoded by the genetic code, or (ii) substitutions with one or more of the amino acid residues having a substituent group, or (iii) fusion of the mature polypeptide with another compound, such as a compound to increase the stability and/or solubility of the polypeptide (for example, polyethylene glycol), (iv) fusion of the polypeptide with additional amino acids, such as, for example, an IgG Fc fusion region peptide, serum albumin (preferably human serum albumin) or a fragment thereof, or leader or secretory sequence, or a sequence facilitating purification, or (v) fusion of the polypeptide with another compound, such as albumin (including but not limited to recombinant albumin (see, e.g., U.S. Pat. No. 5,876,969, issued Mar. 2, 1999, EP Patent 0 413 622, and U.S. Pat. No. 5,766,883, issued Jun. 16, 1998, herein incorporated by reference in their entirety)). Such variant polypeptides are deemed to be within the scope of those skilled in the art from the teachings herein.

[0197] For example, polypeptide variants containing amino acid substitutions of charged amino acids with other charged or neutral amino acids may produce proteins with improved characteristics, such as less aggregation. Aggregation of pharmaceutical formulations both reduces activity and increases clearance due to the aggregate's immunogenic activity. See Pinckard et al., Clin. Exp. Immunol. 2:331-340 (1967); Robbins et al., Diabetes 36: 838-845 (1987); Cleland et al., Crit. Rev. Therapeutic Drug Carrier Systems 10:307-377 (1993).

[0198] A further embodiment of the invention relates to polypeptides which comprise the amino acid sequence of a polypeptide having an amino acid sequence which contains at least one amino acid substitution, but not more than 50 amino acid substitutions, even more preferably, not more than 40 amino acid substitutions, still more preferably, not more than 30 amino acid substitutions, and still even more preferably, not more than 20 amino acid substitutions from a polypeptide sequence disclosed herein. Of course it is highly preferable for a polypeptide to have an amino acid sequence which, for example, comprises the amino acid sequence of a polypeptide of SEQ ID NO:Y, the amino acid sequence of the mature (e.g., secreted) polypeptide of SEQ ID NO:Y, an amino acid sequence encoded by SEQ ID NO:X, an amino acid sequence encoded by the portion of SEQ ID NO:X as defined in columnns 8 and 9 of Table 2, an amino acid sequence encoded by the complement of SEQ ID NO:X, an amino acid sequence encoded by cDNA contained in ATCC Deposit No: Z, and/or the amino acid sequence of a mature (secreted) polypeptide encoded by cDNA contained in ATCC Deposit No: Z, or a fragment thereof, which contains, in order of ever-increasing preference, at least one, but not more than 10, 9, 8, 7, 6, 5, 4, 3, 2 or 1 amino acid substitutions.

[0199] In specific embodiments, the polypeptides of the invention comprise, or alternatively, consist of, fragments or variants of a reference amino acid sequence selected from: (a) the amino acid sequence of SEQ ID NO:Y or fragments thereof (e.g., the mature form and/or other fragments described herein); (b) the amino acid sequence encoded by SEQ ID NO:X or fragments thereof; (c) the amino acid sequence encoded by the complement of SEQ ID NO:X or fragments thereof; (d) the amino acid sequence encoded by the portion of SEQ ID NO:X as defined in columns 8 and 9 of Table 2 or fragments thereof; and (e) the amino acid sequence encoded by cDNA contained in ATCC Deposit No: Z or fragments thereof; wherein the fragments or variants have 1-5, 5-10, 5-25, 5-50, 10-50 or 50-150, amino acid residue additions, substitutions, and/or deletions when compared to the reference amino acid sequence. In preferred embodiments, the amino acid substitutions are conservative. Polynucleotides encoding these polypeptides are also encompassed by the invention.

Polynucleotide and Polypeptide Fragments

[0200] The present invention is also directed to polynucleotide fragments of the polynucleotides (nucleic acids) of the invention. In the present invention, a “polynucleotide fragment” refers to a polynucleotide having a nucleic acid sequence which, for example: is a portion of the cDNA contained in ATCC Deposit No: Z or the complementary strand thereto; is a portion of the polynucleotide sequence encoding the polypeptide encoded by the cDNA contained in ATCC Deposit No: Z or the complementary strand thereto; is a portion of the polynucleotide sequence encoding the mature (secreted) polypeptide encoded by the cDNA contained in ATCC Deposit No: Z or the complementary strand thereto; is a portion of a polynucleotide sequence encoding the mature amino acid sequence as defined in columns 14 and 15 of Table 1A or the complementary strand thereto; is a portion of a polynucleotide sequence encoding the amino acid sequence encoded by the region of SEQ ID NO:X as defined in columns 8 and 9 of Table 2 or the complementary strand thereto; is a portion of the polynucleotide sequence of SEQ ID NO:X as defined in columns 8 and 9 of Table 2 or the complementary strand thereto; is a portion of the polynucleotide sequence in SEQ ID NO:X or the complementary strand thereto; is a polynucleotide sequence encoding a portion of the polypeptide of SEQ ID NO:Y; is a polynucleotide sequence encoding a portion of a polypeptide encoded by SEQ ID NO:X; is a polynucleotide sequence encoding a portion of a polypeptide encoded by the complement of the polynucleotide sequence in SEQ ID NO:X; is a portion of a polynucleotide sequence encoding the amino acid sequence encoded by the region of SEQ ID NO:B as defined in column 6 of Table 1C or the complementary strand thereto; or is a portion of the polynucleotide sequence of SEQ ID NO:B as defined in column 6 of Table 1C or the complementary strand thereto.

[0201] The polynucleotide fragments of the invention are preferably at least about 15 nt, and more preferably at least about 20 nt, still more preferably at least about 30 nt, and even more preferably, at least about 40 nt, at least about 50 nt, at least about 75 nt, or at least about 150 nt in length. A fragment “at least 20 nt in length,” for example, is intended to include 20 or more contiguous bases from the cDNA sequence contained in ATCC Deposit No: Z, or the nucleotide sequence shown in SEQ ID NO:X or the complementary stand thereto. In this context “about” includes the particularly recited value or a value larger or smaller by several (5, 4, 3, 2, or 1) nucleotides, at either terminus or at both termini. These nucleotide fragments have uses that include, but are not limited to, as diagnostic probes and primers as discussed herein. Of course, larger fragments (e.g., at least 160, 170, 180, 190, 200, 250, 500, 600, 1000, or 2000 nucleotides in length) are also encompassed by the invention.

[0202] Moreover, representative examples of polynucleotide fragments of the invention comprise, or alternatively consist of, a sequence from about nucleotide number 1-50, 51-100, 101-150, 151-200, 201-250, 251-300, 301-350, 351-400, 401-450, 451-500, 501-550, 551-600, 601-650, 651-700, 701-750, 751-800, 801-850, 851-900, 901-950, 951-1000, 1001-1050, 1051-1100, 1101-1150, 1151-1200, 1201-1250, 1251-1300, 1301-1350, 1351-1400, 1401-1450, 1451-1500, 1501-1550, 1551-1600, 1601-1650, 1651-1700, 1701-1750, 1751-1800, 1801-1850, 1851-1900, 1901-1950, 1951-2000, 2001-2050, 2051-2100, 2101-2150, 2151-2200, 2201-2250, 2251-2300, 2301-2350, 2351-2400, 2401-2450, 2451-2500, 2501-2550, 2551-2600, 2601-2650, 2651-2700, 2701-2750, 2751-2800, 2801-2850, 2851-2900, 2901-2950, 2951-3000, 3001-3050, 3051-3100, 3101-3150, 3151-3200, 3201-3250, 3251-3300, 3301-3350, 3351-3400, 3401-3450, 3451-3500, 3501-3550, 3551-3600, 3601-3650, 3651-3700, 3701-3750, 3751-3800, 3801-3850, 3851-3900, 3901-3950, 3951-4000, 4001-4050, 4051-4100, 4101-4150, 4151-4200, 4201-4250, 4251-4300, 4301-4350, 4351-4400, 4401-4450, 4451-4500, 4501-4550, 4551-4600, 4601-4650, 4651-4700, 4701-4750, 4751-4800, 4801-4850, 4851-4900, 4901-4950, 4951-5000, 5001-5050, 5051-5100, 5101-5150, 5151-5200, 5201-5250, 5251-5300, 5301-5350, 5351-5400, 5401-5450, 5451-5500, 5501-5550, 5551-5600, 5601-5650, 5651-5700, 5701-5750, 5751-5800, 5801-5850, 5851-5900, 5901-5950, 5951-6000, 6001-6050, 6051-6100, 6101-6150, 6151-6200, 6201-6250, 6251-6300, 6301-6350, 6351-6400, 6401-6450, 6451-6500, 6501-6550, 6551-6600, 6601-6650, 6651-6700, 6701-6750, 6751-6800, 6801-6850, 6851-6900, 6901-6950, 6951-7000, 7001-7050, 7051-7100, 7101-7150, 7151-7200, 7201-7250, 7251-7300 or 7301 to the end of SEQ ID NO:X, or the complementary strand thereto. In this context “about” includes the particularly recited range or a range larger or smaller by several (5, 4, 3, 2, or 1) nucleotides, at either terminus or at both termini. Preferably, these fragments encode a polypeptide that has a functional activity (e.g., biological activity; such as, for example, activity useful in detecting, preventing, diagnosing, prognosticating, treating, and/or ameliorating allergic and/or asthmatic diseases and disorders). More preferably, these polynucleotides can be used as probes or primers as discussed herein. Polynucleotides which hybridize to one or more of these polynucleotides under stringent hybridization conditions or alternatively, under lower stringency conditions are also encompassed by the invention, as are polypeptides encoded by these polynucleotides.

[0203] Further representative examples of polynucleotide fragments of the invention comprise, or alternatively consist of, a sequence from about nucleotide number 1-50, 51-100, 101-150, 151-200, 201-250, 251-300, 301-350, 351-400, 401-450, 451-500, 501-550, 551-600, 601-650, 651-700, 701-750, 751-800, 801-850, 851-900, 901-950, 951-1000, 1001-1050, 1051-1100, 1101-1150, 1151-1200, 1201-1250, 1251-1300, 1301-1350, 1351-1400, 1401-1450, 1451-1500, 1501-1550, 1551-1600, 1601-1650, 1651-1700, 1701-1750, 1751-1800, 1801-1850, 1851-1900, 1901-1950, 1951-2000, 2001-2050, 2051-2100, 2101-2150, 2151-2200, 2201-2250, 2251-2300, 2301-2350, 2351-2400, 2401-2450, 2451-2500, 2501-2550, 2551-2600, 2601-2650, 2651-2700, 2701-2750, 2751-2800, 2801-2850, 2851-2900, 2901-2950, 2951-3000, 3001-3050, 3051-3100, 3101-3150, 3151-3200, 3201-3250, 3251-3300, 3301-3350, 3351-3400, 3401-3450, 3451-3500, 3501-3550, 3551-3600, 3601-3650, 3651-3700, 3701-3750, 3751-3800, 3801-3850, 3851-3900, 3901-3950, 3951-4000, 4001-4050, 4051-4100, 4101-4150, 4151-4200, 4201-4250, 4251-4300, 4301-4350, 4351-4400, 4401-4450, 4451-4500, 4501-4550, 4551-4600, 4601-4650, 4651-4700, 4701-4750, 4751-4800, 4801-4850, 4851-4900, 4901-4950, 4951-5000, 5001-5050, 5051-5100, 5101-5150, 5151-5200, 5201-5250, 5251-5300, 5301-5350, 5351-5400, 5401-5450, 5451-5500, 5501-5550, 5551-5600, 5601-5650, 5651-5700, 5701-5750, 5751-5800, 5801-5850, 5851-5900, 5901-5950, 5951-6000, 6001-6050, 6051-6100, 6101-6150, 6151-6200, 6201-6250, 6251-6300, 6301-6350, 6351-6400, 6401-6450, 6451-6500, 6501-6550, 6551-6600, 6601-6650, 6651-6700, 6701-6750, 6751-6800, 6801-6850, 6851-6900, 6901-6950, 6951-7000, 7001-7050, 7051-7100, 7101-7150, 7151-7200, 7201-7250, 7251-7300 or 7301 to the end of the cDNA sequence contained in ATCC Deposit No: Z, or the complementary strand thereto. In this context “about” includes the particularly recited range or a range larger or smaller by several (5, 4, 3, 2, or 1) nucleotides, at either terminus or at both termini. Preferably, these fragments encode a polypeptide that has a functional activity (e.g., biological activity). More preferably, these polynucleotides can be used as probes or primers as discussed herein. Polynucleotides which hybridize to one or more of these polynucleotides under stringent hybridization conditions or alternatively, under lower stringency conditions are also encompassed by the invention, as are polypeptides encoded by these polynucleotides.

[0204] Moreover, representative examples of polynucleotide fragments of the invention comprise, or alternatively consist of, a nucleic acid sequence comprising one, two, three, four, five, six, seven, eight, nine, ten, or more of the above described polynucleotide fragments of the invention in combination with a polynucleotide sequence delineated in Table 1C column 6. Additional, representative examples of polynucleotide fragments of the invention comprise, or alternatively consist of, a nucleic acid sequence comprising one, two, three, four, five, six, seven, eight, nine, ten, or more of the above described polynucleotide fragments of the invention in combination with a polynucleotide sequence that is the complementary strand of a sequence delineated in column 6 of Table 1C. In further embodiments, the above-described polynucleotide fragments of the invention comprise, or alternatively consist of, sequences delineated in Table 1C, column 6, and have a nucleic acid sequence which is different from that of the BAC fragment having the sequence disclosed in SEQ ID NO:B (see Table 1C, column 5). In additional embodiments, the above-described polynucleotide fragments of the invention comprise, or alternatively consist of, sequences delineated in Table 1C, column 6, and have a nucleic acid sequence which is different from that published for the BAC clone identified as BAC ID NO:A (see Table 1C, column 4). In additional embodiments, the above-described polynucleotides of the invention comprise, or alternatively consist of, sequences delineated Table 1C, column 6, and have a nucleic acid sequence which is different from that contained in the BAC clone identified as BAC ID NO:A (see Table 1C, column 4). Polypeptides encoded by these polynucleotides, other polynucleotides that encode these polypeptides, and antibodies that bind these polypeptides are also encompassed by the invention. Additionally, fragments and variants of the above-described polynucleotides and polypeptides are also encompassed by the invention.

[0205] In additional specific embodiments, polynucleotides of the invention comprise, or alternatively consist of, one, two, three, four, five, six, seven, eight, nine, ten, or more fragments of the sequences delineated in column 6 of Table 1C, and the polynucleotide sequence of SEQ ID NO:X (e.g., as defined in Table 1C, column 2) or fragments or variants thereof. Polypeptides encoded by these polynucleotides, other polynucleotides that encode these polypeptides, and antibodies that bind these polypeptides are also encompassed by the invention.

[0206] In additional specific embodiments, polynucleotides of the invention comprise, or alternatively consist of, one, two, three, four, five, six, seven, eight, nine, ten, or more fragments of the sequences delineated in column 6 of Table 1C which correspond to the same ATCC Deposit No: Z (see Table 1C, column 1), and the polynucleotide sequence of SEQ ID NO:X (e.g., as defined in Table 1A, 1B, or 1C) or fragments or variants thereof. Polypeptides encoded by these polynucleotides, other polynucleotides that encode these polypeptides, and antibodies that bind these polypeptides are also encompassed by the invention.

[0207] In further specific embodiments, polynucleotides of the invention comprise, or alternatively consist of, one, two, three, four, five, six, seven, eight, nine, ten, or more fragments of the sequences delineated in the same row of column 6 of Table 1C, and the polynucleotide sequence of SEQ ID NO:X (e.g., as defined in Table 1A, 1B, or 1C) or fragments or variants thereof. Polypeptides encoded by these polynucleotides, other polynucleotides that encode these polypeptides, and antibodies that bind these polypeptides are also encompassed by the invention.

[0208] In additional specific embodiments, polynucleotides of the invention comprise, or alternatively consist of a polynucleotide sequence in which the 3′ 10 polynucleotides of one of the sequences delineated in column 6 of Table 1C and the 5′ 10 polynucleotides of the sequence of SEQ ID NO:X are directly contiguous. Nucleic acids that hybridize to the complement of these 20 contiguous polynucleotides under stringent hybridization conditions or alternatively, under lower stringency conditions, are also encompassed by the invention. Polypeptides encoded by these polynucleotides and/or nucleic acids, other polynucleotides and/or nucleic acids that encode these polypeptides, and antibodies that bind these polypeptides are also encompassed by the invention. Additionally, fragments and variants of the above-described polynucleotides, nucleic acids, and polypeptides are also encompassed by the invention.

[0209] In additional specific embodiments, polynucleotides of the invention comprise, or alternatively consist of a polynucleotide sequence in which the 3′ 10 polynucleotides of one of the sequences delineated in column 6 of Table 1C and the 5′ 10 polynucleotides of a fragment or variant of the sequence of SEQ ID NO:X (e.g., as described herein) are directly contiguous Nucleic acids which hybridize to the complement of these 20 contiguous polynucleotides under stringent hybridization conditions or alternatively, under lower stringency conditions, are also encompassed by the invention. Polypeptides encoded by these polynucleotides and/or nucleic acids, other polynucleotides and/or nucleic acids encoding these polypeptides, and antibodies that bind these polypeptides are also encompassed by the invention. Additionally, fragments and variants of the above-described polynucleotides, nucleic acids, and polypeptides are also encompassed by the invention.

[0210] In further specific embodiments, polynucleotides of the invention comprise, or alternatively consist of a polynucleotide sequence in which the 3′ 10 polynucleotides of a fragment or variant of the sequence of SEQ ID NO:X and the 5′ 10 polynucleotides of the sequence of one of the sequences delineated in column 6 of Table 1C are directly contiguous. Nucleic acids that hybridize to the complement of these 20 contiguous polynucleotides under stringent hybridization conditions or alternatively, under lower stringency conditions, are also encompassed by the invention. Polypeptides encoded by these polynucleotides and/or nucleic acids, other polynucleotides and/or nucleic acids encoding these polypeptides, and antibodies that bind these polypeptides are also encompassed by the invention. Additionally, fragments and variants of the above-described polynucleotides, nucleic acids, and polypeptides are also encompassed by the invention.

[0211] In specific embodiments, polynucleotides of the invention comprise, or alternatively consist of a polynucleotide sequence in which the 3′ 10 polynucleotides of one of the sequences delineated in column 6 of Table 1C and the 5′ 10 polynucleotides of another sequence in column 6 are directly contiguous. In preferred embodiments, the 3′ 10 polynucleotides of one of the sequences delineated in column 6 of Table 1C is directly contiguous with the 5′ 10 polynucleotides of the next sequential exon delineated in Table 1C, column 6. Nucleic acids that hybridize to the complement of these 20 contiguous polynucleotides under stringent hybridization conditions or alternatively, under lower stringency conditions, are also encompassed by the invention. Polypeptides encoded by these polynucleotides and/or nucleic acids, other polynucleotides and/or nucleic acids encoding these polypeptides, and antibodies that bind these polypeptides are also encompassed by the invention. Additionally, fragments and variants of the above-described polynucleotides, nucleic acids, and polypeptides are also encompassed by the invention.

[0212] In the present invention, a “polypeptide fragment” refers to an amino acid sequence which is a portion of the amino acid sequence contained in SEQ ID NO:Y, is a portion of the mature form of SEQ ID NO:Y as defined in columns 14 and 15 of Table 1A, a portion of an amino acid sequence encoded by the portion of SEQ ID NO:X as defined in columnns 8 and 9 of Table 2, is a portion of an amino acid sequence encoded by the polynucleotide sequence of SEQ ID NO:X, is a portion of an amino acid sequence encoded by the complement of the polynucleotide sequence in SEQ ID NO:X, is a portion of the amino acid sequence of a mature (secreted) polypeptide encoded by the cDNA contained in ATCC Deposit No: Z, and/or is a portion of an amino acid sequence encoded by the cDNA contained in ATCC Deposit No: Z. Protein (polypeptide) fragments may be “free-standing,” or comprised within a larger polypeptide of which the fragment forms a part or region, most preferably as a single continuous region. Representative examples of polypeptide fragments of the invention, include, for example, fragments comprising, or alternatively consisting of, from about amino acid number 1-20, 21-40, 41-60, 61-80, 81-100, 101-120, 121-140, 141-160, 161-180, 181-200, 201-220, 221-240, 241-260, 261-280, 281-300, 301-320, 321-340, 341-360, 361-380, 381-400, 401-420, 421-440, 441-460, 461-480, 481-500, 501-520, 521-540, 541-560, 561-580, 581-600, 601-620, 621-640, 641-660, 661-680, 681-700, 701-720, 721-740, 741-760, 761-780, 781-800, 801-820, 821-840, 841-860, 861-880, 881-900, 901-920, 921-940, 941-960, 961-980, 981-1000, 1001-1020, 1021-1040, 1041-1060, 1061-1080, 1081-1100, 1101-1120, 1121-1140, 1141-1160, 1161-1180, 1181-1200, 1201-1220, 1221-1240, 1241-1260, 1261-1280, 1281-1300, 1301-1320, 1321-1340, 1341-1360, 1361-1380, 1381-1400, 1401-1420, 1421-1440, or 1441 to the end of the coding region of cDNA and SEQ ID NO: Y. In a preferred embodiment, polypeptide fragments of the invention include, for example, fragments comprising, or alternatively consisting of, from about amino acid number 1-20, 21-40, 41-60, 61-80, 81-100, 101-120, 121-140, 141-160, 161-180, 181-200, 201-220, 221-240, 241-260, 261-280, 281-300, 301-320, 321-340, 341-360, 361-380, 381-400, 401-420, 421-440, 441-460, 461-480, 481-500, 501-520, 521-540, 541-560, 561-580, 581-600, 601-620, 621-640, 641-660, 661-680, 681-700, 701-720, 721-740, 741-760, 761-780, 781-800, 801-820, 821-840, 841-860, 861-880, 881-900, 901-920, 921-940, 941-960, 961-980, 981-1000, 1001-1020, 1021-1040, 1041-1060, 1061-1080, 1081-1100, 1101-1120, 1121-1140, 1141-1160, 1161-1180, 1181-1200, 1201-1220, 1221-1240, 1241-1260, 1261-1280, 1281-1300, 1301-1320, 1321-1340, 1341-1360, 1361-1380, 1381-1400, 1401-1420, 1421-1440, or 1441 to the end of the coding region of SEQ ID NO:Y. Moreover, polypeptide fragments of the invention may be at least about 10, 15, 20, 25, 30, 35, 40, 45, 50, 55, 60, 65, 70, 75, 80, 85, 90, 100, 110, 120, 130, 140, or 150 amino acids in length. In this context “about” includes the particularly recited ranges or values, or ranges or values larger or smaller by several (5, 4, 3, 2, or 1) amino acids, at either extreme or at both extremes. Polynucleotides encoding these polypeptide fragments are also encompassed by the invention.

[0213] Even if deletion of one or more amino acids from the N-terminus of a protein results in modification of loss of one or more biological functions of the protein, other functional activities (e.g., biological activities; such as, for example, activity useful in detecting, preventing, diagnosing, prognosticating, treating, and/or ameliorating allergic and/or asthmatic diseases and disorders; ability to multimerize; ability to bind a ligand; antigenic ability useful for production of polypeptide specific antibodies) may still be retained. For example, the ability of shortened muteins to induce and/or bind to antibodies which recognize the complete or mature forms of the polypeptides generally will be retained when less than the majority of the residues of the complete or mature polypeptide are removed from the N-terminus. Whether a particular polypeptide lacking N-terminal residues of a complete polypeptide retains such immunologic activities can readily be determined by routine methods described herein and otherwise known in the art. It is not unlikely that a mutein with a large number of deleted N-terminal amino acid residues may retain some biological or immunogenic activities. In fact, peptides composed of as few as six amino acid residues may often evoke an immune response.

[0214] Accordingly, polypeptide fragments include the secreted protein as well as the mature form. Further preferred polypeptide fragments include the secreted protein or the mature form having a continuous series of deleted residues from the amino or the carboxy terminus, or both. For example, any number of amino acids, ranging from 1-60, can be deleted from the amino terminus of either the secreted polypeptide or the mature form. Similarly, any number of amino acids, ranging from 1-30, can be deleted from the carboxy terminus of the secreted protein or mature form. Furthermore, any combination of the above amino and carboxy terminus deletions are preferred. Similarly, polynucleotides encoding these polypeptide fragments are also preferred.

[0215] The present invention further provides polypeptides having one or more residues deleted from the amino terminus of the amino acid sequence of a polypeptide disclosed herein (e.g., a polypeptide of SEQ ID NO:Y, a polypeptide as defined in columns 14 and 15 of Table 1A, a polypeptide encoded by the polynucleotide sequence contained in SEQ ID NO:X or the complement thereof, a polypeptide encoded by the portion of SEQ ID NO:X as defined in columns 8 and 9 of Table 2, a polypeptide encoded by the portion of SEQ ID NO:B as defined in column 6 of Table 1C, a polypeptide encoded by the cDNA contained in ATCC Deposit No: Z, and/or a mature polypeptide encoded by the cDNA contained in ATCC Deposit No: Z). In particular, N-terminal deletions may be described by the general formula m-q, where q is a whole integer representing the total number of amino acid residues in a polypeptide of the invention (e.g., the polypeptide disclosed in SEQ ID NO:Y, the mature (secreted) portion of SEQ ID NO:Y as defined in columns 14 and 15 of Table 1A, or the polypeptide encoded by the portion of SEQ ID NO:X as defined in columns 8 and 9 of Table 2), and m is defined as any integer ranging from 2 to q-6. Polynucleotides encoding these polypeptides are also encompassed by the invention.

[0216] The present invention further provides polypeptides having one or more residues from the carboxy terminus of the amino acid sequence of a polypeptide disclosed herein (e.g., a polypeptide of SEQ ID NO:Y, the mature (secreted) portion of SEQ ID NO:Y as defined in columns 14 and 15 of Table 1A, a polypeptide encoded by the polynucleotide sequence contained in SEQ ID NO:X, a polypeptide encoded by the portion of SEQ ID NO:X as defined in columns 8 and 9 of Table 2, a polypeptide encoded by the portion of SEQ ID NO:B as defined in column 6 of Table 1C, a polypeptide encoded by the cDNA contained in ATCC Deposit No: Z, and/or a mature polypeptide encoded by the cDNA contained in ATCC Deposit No: Z). In particular, C-terminal deletions may be described by the general formula 1-n, where n is any whole integer ranging from 6 to q-1, and where n corresponds to the position of amino acid residue in a polypeptide of the invention. Polynucleotides encoding these polypeptides are also encompassed by the invention.

[0217] In addition, any of the N- or C-terminal deletions described above can be combined to produce a N- and C-terminal deleted polypeptide. The invention also provides polypeptides having one or more amino acids deleted from both the amino and the carboxyl termini, which may be described generally as having residues m-n of a polypeptide encoded by SEQ ID NO:X (e.g., including, but not limited to, the preferred polypeptide disclosed as SEQ ID NO:Y, the mature (secreted) portion of SEQ ID NO:Y as defined in columns 14 and 15 of Table 1A, and the polypeptide encoded by the portion of SEQ ID NO:X as defined in columns 8 and 9 of Table 2), the cDNA contained in ATCC Deposit No: Z, and/or the complement thereof, where n and m are integers as described above. Polynucleotides encoding these polypeptides are also encompassed by the invention.

[0218] Also as mentioned above, even if deletion of one or more amino acids from the C-terminus of a protein results in modification of loss of one or more biological functions of the protein, other functional activities (e.g., biological activities such as, for example, activity useful in detecting, preventing, diagnosing, prognosticating, treating, and/or ameliorating allergic and/or asthmatic diseases and disorders; ability to multimerize; ability to bind a ligand; antigenic ability useful for production of polypeptide specific antibodies) may still be retained. For example the ability of the shortened mutein to induce and/or bind to antibodies which recognize the complete or mature forms of the polypeptide generally will be retained when less than the majority of the residues of the complete or mature polypeptide are removed from the C-terminus. Whether a particular polypeptide lacking C-terminal residues of a complete polypeptide retains such immunologic activities can readily be determined by routine methods described herein and otherwise known in the art. It is not unlikely that a mutein with a large number of deleted C-terminal amino acid residues may retain some biological or immunogenic activities. In fact, peptides composed of as few as six amino acid residues may often evoke an immune response.

[0219] The present application is also directed to proteins containing polypeptides at least 80%, 85%, 90%, 95%, 96%, 97%, 98% or 99% identical to a polypeptide sequence set forth herein. In preferred embodiments, the application is directed to proteins containing polypeptides at least 80%, 85%, 90%, 95%, 96%, 97%, 98% or 99% identical to polypeptides having the amino acid sequence of the specific N- and C-terminal deletions. Polynucleotides encoding these polypeptides are also encompassed by the invention.

[0220] Any polypeptide sequence encoded by, for example, the polynucleotide sequences set forth as SEQ ID NO:X or the complement thereof, (presented, for example, in Tables 1A and 2), the cDNA contained in ATCC Deposit No: Z, or the polynucleotide sequence as defined in column 6 of Table 1C, may be analyzed to determine certain preferred regions of the polypeptide. For example, the amino acid sequence of a polypeptide encoded by a polynucleotide sequence of SEQ ID NO:X (e.g., the polypeptide of SEQ ID NO:Y and the polypeptide encoded by the portion of SEQ ID NO:X as defined in columnns 8 and 9 of Table 2) or the cDNA contained in ATCC Deposit No: Z may be analyzed using the default parameters of the DNASTAR computer algorithm (DNASTAR, Inc., 1228 S. Park St., Madison, Wis. 53715 USA; http://www.dnastar.com/).

[0221] Polypeptide regions that may be routinely obtained using the DNASTAR computer algorithm include, but are not limited to, Garnier-Robson alpha-regions, beta-regions, turn-regions, and coil-regions; Chou-Fasman alpha-regions, beta-regions, and turn-regions; Kyte-Doolittle hydrophilic regions and hydrophobic regions; Eisenberg alpha- and beta-amphipathic regions; Karplus-Schulz flexible regions; Emini surface-forming regions; and Jameson-Wolf regions of high antigenic index. Among highly preferred polynucleotides of the invention in this regard are those that encode polypeptides comprising regions that combine several structural features, such as several (e.g., 1, 2, 3 or 4) of the features set out above.

[0222] Additionally, Kyte-Doolittle hydrophilic regions and hydrophobic regions, Emini surface-forming regions, and Jameson-Wolf regions of high antigenic index (i.e., containing four or more contiguous amino acids having an antigenic index of greater than or equal to 1.5, as identified using the default parameters of the Jameson-Wolf program) can routinely be used to determine polypeptide regions that exhibit a high degree of potential for antigenicity. Regions of high antigenicity are determined from data by DNASTAR analysis by choosing values that represent regions of the polypeptide which are likely to be exposed on the surface of the polypeptide in an environment in which antigen recognition may occur in the process of initiation of an immune response.

[0223] Preferred polypeptide fragments of the invention are fragments comprising, or alternatively, consisting of, an amino acid sequence that displays a functional activity (e.g. biological activity such as, for example, activity useful in detecting, preventing, diagnosing, prognosticating, treating, and/or ameliorating allergic and/or asthmatic diseases and disorders; ability to multimerize; ability to bind a ligand; antigenic ability useful for production of polypeptide specific antibodies) of the polypeptide sequence of which the amino acid sequence is a fragment. By a polypeptide displaying a “functional activity” is meant a polypeptide capable of one or more known functional activities associated with a full-length protein, such as, for example, biological activity, antigenicity, immunogenicity, and/or multimerization, as described herein.

[0224] Other preferred polypeptide fragments are biologically active fragments. Biologically active fragments are those exhibiting activity similar, but not necessarily identical, to an activity of the polypeptide of the present invention. The biological activity of the fragments may include an improved desired activity, or a decreased undesirable activity.

[0225] In preferred embodiments, polypeptides of the invention comprise, or alternatively consist of, one, two, three, four, five or more of the antigenic fragments of the polypeptide of SEQ ID NO:Y, or portions thereof. Polynucleotides encoding these polypeptides are also encompassed by the invention.

Epitopes and Antibodies

[0226] The present invention encompasses polypeptides comprising, or alternatively consisting of, an epitope of: the polypeptide sequence shown in SEQ ID NO:Y; a polypeptide sequence encoded by SEQ ID NO:X or the complementary strand thereto; the polypeptide sequence encoded by the portion of SEQ ID NO:X as defined in columns 8 and 9 of Table 2; the polypeptide sequence encoded by the portion of SEQ ID NO:B as defined in column 6 of Table 1C or the complement thereto; the polypeptide sequence encoded by the cDNA contained in ATCC Deposit No: Z; or the polypeptide sequence encoded by a polynucleotide that hybridizes to the sequence of SEQ ID NO:X, the complement of the sequence of SEQ ID NO:X, the complement of a portion of SEQ ID NO:X as defined in columns 8 and 9 of Table 2, or the cDNA sequence contained in ATCC Deposit No: Z under stringent hybridization conditions or alternatively, under lower stringency hybridization as defined supra. The present invention further encompasses polynucleotide sequences encoding an epitope of a polypeptide sequence of the invention (such as, for example, the sequence disclosed in SEQ ID NO:X, or a fragment thereof), polynucleotide sequences of the complementary strand of a polynucleotide sequence encoding an epitope of the invention, and polynucleotide sequences which hybridize to the complementary strand under stringent hybridization conditions or alternatively, under lower stringency hybridization conditions defined supra.

[0227] The term “epitopes,” as used herein, refers to portions of a polypeptide having antigenic or immunogenic activity in an animal, preferably a mammal, and most preferably in a human. In a preferred embodiment, the present invention encompasses a polypeptide comprising an epitope, as well as the polynucleotide encoding this polypeptide. An “immunogenic epitope,” as used herein, is defined as a portion of a protein that elicits an antibody response in an animal, as determined by any method known in the art, for example, by the methods for generating antibodies described infra. (See, for example, Geysen et al., Proc. Natl. Acad. Sci. USA 81:3998-4002 (1983)). The term “antigenic epitope,” as used herein, is defined as a portion of a protein to which an antibody can immunospecifically bind its antigen as determined by any method well known in the art, for example, by the immunoassays described herein. Immunospecific binding excludes non-specific binding but does not necessarily exclude cross-reactivity with other antigens. Antigenic epitopes need not necessarily be immunogenic.

[0228] Fragments which function as epitopes may be produced by any conventional means. (See, e.g., Houghten, R. A., Proc. Natl. Acad. Sci. USA 82:5131-5135 (1985) further described in U.S. Pat. No. 4,631,211.)

[0229] In the present invention, antigenic epitopes preferably contain a sequence of at least 4, at least 5, at least 6, at least 7, more preferably at least 8, at least 9, at least 10, at least 11, at least 12, at least 13, at least 14, at least 15, at least 20, at least 25, at least 30, at least 40, at least 50, and, most preferably, between about 15 to about 30 amino acids. Preferred polypeptides comprising immunogenic or antigenic epitopes are at least 10, 15, 20, 25, 30, 35, 40, 45, 50, 55, 60, 65, 70, 75, 80, 85, 90, 95, or 100 amino acid residues in length. Additional non-exclusive preferred antigenic epitopes include the antigenic epitopes disclosed herein, as well as portions thereof. Antigenic epitopes are useful, for example, to raise antibodies, including monoclonal antibodies, which specifically bind the epitope. Preferred antigenic epitopes include the antigenic epitopes disclosed herein, as well as any combination of two, three, four, five or more of these antigenic epitopes. Antigenic epitopes can be used as the target molecules in immunoassays. (See, for instance, Wilson et al., Cell 37:767-778 (1984); Sutcliffe et al., Science 219:660-666 (1983)).

[0230] Non-limiting examples of epitopes of polypeptides that can be used to generate antibodies of the invention include a polypeptide comprising, or alternatively consisting of, at least one, two, three, four, five, six or more of the portion(s) of SEQ ID NO:Y specified in Table 1B. These polypeptide fragments have been determined to bear antigenic epitopes of the proteins of the invention by the analysis of the Jameson-Wolf antigenic index, which is included in the DNAStar suite of computer programs. By “comprise” it is intended that a polypeptide contains at least one, two, three, four, five, six or more of the portion(s) of SEQ ID NO:Y shown in Table 1B, but it may contain additional flanking residues on either the amino or carboxyl termini of the recited portion. Such additional flanking sequences are preferably sequences naturally found adjacent to the portion; i.e., contiguous sequence shown in SEQ ID NO:Y. The flanking sequence may, however, be sequences from a heterolgous polypeptide, such as from another protein described herein or from a heterologous polypeptide not described herein. In particular embodiments, epitope portions of a polypeptide of the invention comprise one, two, three, or more of the portions of SEQ ID NO:Y shown in Table 1B.

[0231] Similarly, immunogenic epitopes can be used, for example, to induce antibodies according to methods well known in the art. See, for instance, Sutcliffe et al., supra; Wilson et al., supra; Chow et al., Proc. Natl. Acad. Sci. USA 82:910-914; and Bittle et al., J. Gen. Virol. 66:2347-2354 (1985). Preferred immunogenic epitopes include the immunogenic epitopes disclosed herein, as well as any combination of two, three, four, five or more of these immunogenic epitopes. The polypeptides comprising one or more immunogenic epitopes may be presented for eliciting an antibody response together with a carrier protein, such as an albumin, to an animal system (such as rabbit or mouse), or, if the polypeptide is of sufficient length (at least about 25 amino acids), the polypeptide may be presented without a carrier. However, immunogenic epitopes comprising as few as 8 to 10 amino acids have been shown to be sufficient to raise antibodies capable of binding to, at the very least, linear epitopes in a denatured polypeptide (e.g., in Western blotting).

[0232] Epitope-bearing polypeptides of the present invention may be used to induce antibodies according to methods well known in the art including, but not limited to, in vivo immunization, in vitro immunization, and phage display methods. See, e.g., Sutcliffe et al., supra; Wilson et al., supra, and Bittle et al., J. Gen. Virol., 66:2347-2354 (1985). If in vivo immunization is used, animals may be immunized with free peptide; however, anti-peptide antibody titer may be boosted by coupling the peptide to a macromolecular carrier, such as keyhole limpet hemacyanin (KLH) or tetanus toxoid. For instance, peptides containing cysteine residues may be coupled to a carrier using a linker such as maleimidobenzoyl-N-hydroxysuccinimide ester (MBS), while other peptides may be coupled to carriers using a more general linking agent such as glutaraldehyde. Animals such as rabbits, rats and mice are immunized with either free or carrier-coupled peptides, for instance, by intraperitoneal and/or intradermal injection of emulsions containing about 100 μg of peptide or carrier protein and Freund's adjuvant or any other adjuvant known for stimulating an immune response. Several booster injections may be needed, for instance, at intervals of about two weeks, to provide a useful titer of anti-peptide antibody that can be detected, for example, by ELISA assay using free peptide adsorbed to a solid surface. The titer of anti-peptide antibodies in serum from an immunized animal may be increased by selection of anti-peptide antibodies, for instance, by adsorption to the peptide on a solid support and elution of the selected antibodies according to methods well known in the art.

[0233] As one of skill in the art will appreciate, and as discussed above, the polypeptides of the present invention (e.g., those comprising an immunogenic or antigenic epitope) can be fused to heterologous polypeptide sequences. For example, polypeptides of the present invention (including fragments or variants thereof), may be fused with the constant domain of immunoglobulins (IgA, IgE, IgG, IgM), or portions thereof (CH1, CH2, CH3, or any combination thereof and portions thereof, resulting in chimeric polypeptides. By way of another non-limiting example, polypeptides and/or antibodies of the present invention (including fragments or variants thereof) may be fused with albumin (including but not limited to recombinant human serum albumin or fragments or variants thereof (see, e.g., U.S. Pat. No. 5,876,969, issued Mar. 2, 1999, EP Patent 0 413 622, and U.S. Pat. No. 5,766,883, issued Jun. 16, 1998, herein incorporated by reference in their entirety)). In a preferred embodiment, polypeptides and/or antibodies of the present invention (including fragments or variants thereof) are fused with the mature form of human serum albumin (i.e., amino acids 1-585 of human serum albumin as shown in FIGS. 1 and 2 of EP Patent 0 322 094) which is herein incorporated by reference in its entirety. In another preferred embodiment, polypeptides and/or antibodies of the present invention (including fragments or variants thereof) are fused with polypeptide fragments comprising, or alternatively consisting of, amino acid residues 1-z of human serum albumin, where z is an integer from 369 to 419, as described in U.S. Pat. No. 5,766,883 herein incorporated by reference in its entirety. Polypeptides and/or antibodies of the present invention (including fragments or variants thereof) may be fused to either the N- or C-terminal end of the heterologous protein (e.g., immunoglobulin Fc polypeptide or human serum albumin polypeptide). Polynucleotides encoding fusion proteins of the invention are also encompassed by the invention.

[0234] Such fusion proteins as those described above may facilitate purification and may increase half-life in vivo. This has been shown for chimeric proteins consisting of the first two domains of the human CD4-polypeptide and various domains of the constant regions of the heavy or light chains of mammalian immunoglobulins. See, e.g., EP 394,827; Traunecker et al., Nature, 331:84-86 (1988). Enhanced delivery of an antigen across the epithelial barrier to the immune system has been demonstrated for antigens (e.g., insulin) conjugated to an FcRn binding partner such as IgG or Fc fragments (see, e.g., PCT Publications WO 96/22024 and WO 99/04813). IgG fusion proteins that have a disulfide-linked dimeric structure due to the IgG portion desulfide bonds have also been found to be more efficient in binding and neutralizing other molecules than monomeric polypeptides or fragments thereof alone. See, e.g., Fountoulakis et al., J. Biochem., 270:3958-3964 (1995). Nucleic acids encoding the above epitopes can also be recombined with a gene of interest as an epitope tag (e.g., the hemagglutinin (HA) tag or flag tag) to aid in detection and purification of the expressed polypeptide. For example, a system described by Janknecht et al. allows for the ready purification of non-denatured fusion proteins expressed in human cell lines (Janknecht et al., 1991, Proc. Natl. Acad. Sci. USA 88:8972-897). In this system, the gene of interest is subcloned into a vaccinia recombination plasmid such that the open reading frame of the gene is translationally fused to an amino-terminal tag consisting of six histidine residues. The tag serves as a matrix-binding domain for the fusion protein. Extracts from cells infected with the recombinant vaccinia virus are loaded onto Ni2+ nitriloacetic acid-agarose column and histidine-tagged proteins can be selectively eluted with imidazole-containing buffers.

Fusion Proteins

[0235] Any polypeptide of the present invention can be used to generate fusion proteins. For example, the polypeptide of the present invention, when fused to a second protein, can be used as an antigenic tag. Antibodies raised against the polypeptide of the present invention can be used to indirectly detect the second protein by binding to the polypeptide. Moreover, because secreted proteins target cellular locations based on trafficking signals, polypeptides of the present invention which are shown to be secreted can be used as targeting molecules once fused to other proteins.

[0236] Examples of domains that can be fused to polypeptides of the present invention include not only heterologous signal sequences, but also other heterologous functional regions. The fusion does not necessarily need to be direct, but may occur through linker sequences.

[0237] In certain preferred embodiments, proteins of the invention are fusion proteins comprising an amino acid sequence that is an N and/or C-terminal deletion of a polypeptide of the invention. In preferred embodiments, the invention is directed to a fusion protein comprising an amino acid sequence that is at least 90%, 95%, 96%, 97%, 98% or 99% identical to a polypeptide sequence of the invention. Polynucleotides encoding these proteins are also encompassed by the invention.

[0238] Moreover, fusion proteins may also be engineered to improve characteristics of the polypeptide of the present invention. For instance, a region of additional amino acids, particularly charged amino acids, may be added to the N-terminus of the polypeptide to improve stability and persistence during purification from the host cell or subsequent handling and storage. Also, peptide moieties may be added to the polypeptide to facilitate purification. Such regions may be removed prior to final preparation of the polypeptide. The addition of peptide moieties to facilitate handling of polypeptides is familiar and routine techniques in the art.

[0239] As one of skill in the art will appreciate that, as discussed above, polypeptides of the present invention, and epitope-bearing fragments thereof, can be combined with heterologous polypeptide sequences. For example, the polypeptides of the present invention may be fused with heterologous polypeptide sequences, for example, the polypeptides of the present invention may be fused with the constant domain of immunoglobulins (IgA, IgE, IgG, IgM) or portions thereof (CH1, CH2, CH3, and any combination thereof, including both entire domains and portions thereof), or albumin (including, but not limited to, native or recombinant human albumin or fragments or variants thereof (see, e.g., U.S. Pat. No. 5,876,969, issued Mar. 2, 1999, EP Patent 0 413 622, and U.S. Pat. No. 5,766,883, issued Jun. 16, 1998, herein incorporated by reference in their entirety)), resulting in chimeric polypeptides. For example, EP-A-O 464 533 (Canadian counterpart 2045869) discloses fusion proteins comprising various portions of constant region of immunoglobulin molecules together with another human protein or part thereof. In many cases, the Fc part in a fusion protein is beneficial in therapy and diagnosis, and thus can result in, for example, improved pharmacokinetic properties (EP-A 0232 262). Alternatively, deleting the Fc part after the fusion protein has been expressed, detected, and purified, would be desired. For example, the Fc portion may hinder therapy and diagnosis if the fusion protein is used as an antigen for immunizations. In drug discovery, for example, human proteins, such as hIL-5, have been fused with Fc portions for the purpose of high-throughput screening assays to identify antagonists of hIL-5. See, D. Bennett et al., J. Molecular Recognition 8:52-58 (1995); K. Johanson et al., J. Biol. Chem. 270:9459-9471 (1995).

[0240] Moreover, the polypeptides of the present invention can be fused to marker sequences, such as a polypeptide that facilitates purification of the fused polypeptide. In preferred embodiments, the marker amino acid sequence is a hexa-histidine peptide, such as the tag provided in a pQE vector (QIAGEN, Inc., 9259 Eton Avenue, Chatsworth, Calif., 91311), among others, many of which are commercially available. As described in Gentz et al., Proc. Natl. Acad. Sci. USA 86:821-824 (1989), for instance, hexa-histidine provides for convenient purification of the fusion protein. Another peptide tag useful for purification, the “HA” tag, corresponds to an epitope derived from the influenza hemagglutinin protein (Wilson et al., Cell 37:767 (1984)).

[0241] Additional fusion proteins of the invention may be generated through the techniques of gene-shuffling, motif-shuffling, exon-shuffling, and/or codon-shuffling (collectively referred to as “DNA shuffling”). DNA shuffling may be employed to modulate the activities of polypeptides of the invention, such methods can be used to generate polypeptides with altered activity, as well as agonists and antagonists of the polypeptides. See, generally, U.S. Pat. Nos. 5,605,793; 5,811,238; 5,830,721; 5,834,252; and 5,837,458, and Patten et al., Curr. Opinion Biotechnol. 8:724-33 (1997); Harayama, Trends Biotechnol. 16(2):76-82 (1998); Hansson, et al., J. Mol. Biol. 287:265-76 (1999); and Lorenzo and Blasco, Biotechniques 24(2):308-13 (1998) (each of these patents and publications are hereby incorporated by reference in its entirety). In one embodiment, alteration of polynucleotides corresponding to SEQ ID NO:X and the polypeptides encoded by these polynucleotides may be achieved by DNA shuffling. DNA shuffling involves the assembly of two or more DNA segments by homologous or site-specific recombination to generate variation in the polynucleotide sequence. In another embodiment, polynucleotides of the invention, or the encoded polypeptides, may be altered by being subjected to random mutagenesis by error-prone PCR, random nucleotide insertion or other methods prior to recombination. In another embodiment, one or more components, motifs, sections, parts, domains, fragments, etc., of a polynucleotide encoding a polypeptide of the invention may be recombined with one or more components, motifs, sections, parts, domains, fragments, etc. of one or more heterologous molecules.

[0242] Thus, any of these above fusions can be engineered using the polynucleotides or the polypeptides of the present invention.

Recombinant and Synthetic Production of Polypeptides of the Invention

[0243] The present invention also relates to vectors containing the polynucleotide of the present invention, host cells, and the production of polypeptides by synthetic and recombinant techniques. The vector may be, for example, a phage, plasmid, viral, or retroviral vector. Retroviral vectors may be replication competent or replication defective. In the latter case, viral propagation generally will occur only in complementing host cells.

[0244] The polynucleotides of the invention may be joined to a vector containing a selectable marker for propagation in a host. Generally, a plasmid vector is introduced in a precipitate, such as a calcium phosphate precipitate, or in a complex with a charged lipid. If the vector is a virus, it may be packaged in vitro using an appropriate packaging cell line and then transduced into host cells.

[0245] The polynucleotide insert should be operatively linked to an appropriate promoter, such as the phage lambda PL promoter, the E. coli lac, trp, phoA and tac promoters, the SV40 early and late promoters and promoters of retroviral LTRs, to name a few. Other suitable promoters will be known to the skilled artisan. The expression constructs will further contain sites for transcription initiation, termination, and, in the transcribed region, a ribosome-binding site for translation. The coding portion of the transcripts expressed by the constructs will preferably include a translation initiating codon at the beginning and a termination codon (UAA, UGA or UAG) appropriately positioned at the end of the polypeptide to be translated.

[0246] As indicated, the expression vectors will preferably include at least one selectable marker. Such markers include dihydrofolate reductase, G418, glutamine synthase, or neomycin resistance for eukaryotic cell culture, and tetracycline, kanamycin or ampicillin resistance genes for culturing in E. coli and other bacteria. Representative examples of appropriate hosts include, but are not limited to, bacterial cells, such as E. coli, Streptomyces and Salmonella typhimurium cells; fungal cells, such as yeast cells (e.g., Saccharomyces cerevisiae or Pichia pastoris (ATCC Accession No. 201178)); insect cells such as Drosophila S2 and Spodoptera Sf9 cells; animal cells such as CHO, COS, 293, and Bowes melanoma cells; and plant cells. Appropriate culture mediums and conditions for the above-described host cells are known in the art.

[0247] Among vectors preferred for use in bacteria include pQE70, pQE60 and pQE-9, available from QIAGEN, Inc.; pBluescript vectors, Phagescript vectors, pNH8A, pNH16a, pNH18A, pNH46A, available from Stratagene Cloning Systems, Inc.; and ptrc99a, pKK223-3, pKK233-3, pDR540, pRIT5 available from Pharmacia Biotech, Inc. Among preferred eukaryotic vectors are pWLNEO, pSV2CAT, pOG44, pXT1 and pSG available from Stratagene; and pSVK3, pBPV, pMSG and pSVL available from Pharmacia. Preferred expression vectors for use in yeast systems include, but are not limited to pYES2, pYD1, pTEF1/Zeo, pYES2/GS, pPICZ, pGAPZ, pGAPZalph, pPIC9, pPIC3.5, pHIL-D2, pHIL-S1, pPIC3.5K, pPIC9K, and PA0815 (all available from Invitrogen, Carlbad, Calif.). Other suitable vectors will be readily apparent to the skilled artisan.

[0248] Vectors which use glutamine synthase (GS) or DHFR as the selectable markers can be amplified in the presence of the drugs methionine sulphoximine or methotrexate, respectively. An advantage of glutamine synthase based vectors is the availabilty of cell lines (e.g., the murine myeloma cell line, NS0) which are glutamine synthase negative. Glutamine synthase expression systems can also function in glutamine synthase expressing cells (e.g., Chinese Hamster Ovary (CHO) cells) by providing additional inhibitor to prevent the functioning of the endogenous gene. A glutamine synthase expression system and components thereof are detailed in PCT publications: WO87/04462; WO86/05807; WO89/01036; WO89/10404; and WO91/06657, which are hereby incorporated in their entireties by reference herein. Additionally, glutamine synthase expression vectors can be obtained from Lonza Biologics, Inc. (Portsmouth, N.H.). Expression and production of monoclonal antibodies using a GS expression system in murine myeloma cells is described in Bebbington et al., Bio/technology 10:169 (1992) and in Biblia and Robinson Biotechnol. Prog. 11:1 (1995), which are herein incorporated by reference.

[0249] The present invention also relates to host cells containing the above-described vector constructs described herein, and additionally encompasses host cells containing nucleotide sequences of the invention that are operably associated with one or more heterologous control regions (e.g., promoter and/or enhancer) using techniques known of in the art. The host cell can be a higher eukaryotic cell, such as a mammalian cell (e.g., a human derived cell), or a lower eukaryotic cell, such as a yeast cell, or the host cell can be a prokaryotic cell, such as a bacterial cell. A host strain may be chosen which modulates the expression of the inserted gene sequences, or modifies and processes the gene product in the specific fashion desired. Expression from certain promoters can be elevated in the presence of certain inducers; thus expression of the genetically engineered polypeptide may be controlled. Furthermore, different host cells have characteristics and specific mechanisms for the translational and post-translational processing and modification (e.g., phosphorylation, cleavage) of proteins. Appropriate cell lines can be chosen to ensure the desired modifications and processing of the foreign protein expressed.

[0250] Introduction of the nucleic acids and nucleic acid constructs of the invention into the host cell can be effected by calcium phosphate transfection, DEAE-dextran mediated transfection, cationic lipid-mediated transfection, electroporation, transduction, infection, or other methods. Such methods are described in many standard laboratory manuals, such as Davis et al., Basic Methods In Molecular Biology (1986). It is specifically contemplated that the polypeptides of the present invention may in fact be expressed by a host cell lacking a recombinant vector.

[0251] In addition to encompassing host cells containing the vector constructs discussed herein, the invention also encompasses primary, secondary, and immortalized host cells of vertebrate origin, particularly mammalian origin, that have been engineered to delete or replace endogenous genetic material (e.g., the coding sequence), and/or to include genetic material (e.g., heterologous polynucleotide sequences) that is operably associated with polynucleotides of the invention, and which activates, alters, and/or amplifies endogenous polynucleotides. For example, techniques known in the art may be used to operably associate heterologous control regions (e.g., promoter and/or enhancer) and endogenous polynucleotide sequences via homologous recombination (see, e.g., U.S. Pat. No. 5,641,670, issued Jun. 24, 1997; International Publication Number WO 96/29411; International Publication Number WO 94/12650; Koller et al., Proc. Natl. Acad. Sci. USA 86:8932-8935 (1989); and Zijlstra et al., Nature 342:435-438 (1989), the disclosures of each of which are incorporated by reference in their entireties).

[0252] Polypeptides of the invention can be recovered and purified from recombinant cell cultures by well-known methods including ammonium sulfate or ethanol precipitation, acid extraction, anion or cation exchange chromatography, phosphocellulose chromatography, hydrophobic interaction chromatography, affinity chromatography, hydroxylapatite chromatography and lectin chromatography. Most preferably, high performance liquid chromatography (“FPLC”) is employed for purification.

[0253] Polypeptides of the present invention can also be recovered from: products purified from natural sources, including bodily fluids, tissues and cells, whether directly isolated or cultured; products of chemical synthetic procedures; and products produced by recombinant techniques from a prokaryotic or eukaryotic host, including, for example, bacterial, yeast, higher plant, insect, and mammalian cells. Depending upon the host employed in a recombinant production procedure, the polypeptides of the present invention may be glycosylated or may be non-glycosylated. In addition, polypeptides of the invention may also include an initial modified methionine residue, in some cases as a result of host-mediated processes. Thus, it is well known in the art that the N-terminal methionine encoded by the translation initiation codon generally is removed with high efficiency from any protein after translation in all eukaryotic cells. While the N-terminal methionine on most proteins also is efficiently removed in most prokaryotes, for some proteins, this prokaryotic removal process is inefficient, depending on the nature of the amino acid to which the N-terminal methionine is covalently linked.

[0254] In one embodiment, the yeast Pichia pastoris is used to express polypeptides of the invention in a eukaryotic system. Pichia pastoris is a methylotrophic yeast which can metabolize methanol as its sole carbon source. A main step in the methanol metabolization pathway is the oxidation of methanol to formaldehyde using O₂. This reaction is catalyzed by the enzyme alcohol oxidase. In order to metabolize methanol as its sole carbon source, Pichia pastoris must generate high levels of alcohol oxidase due, in part, to the relatively low affinity of alcohol oxidase for O₂. Consequently, in a growth medium depending on methanol as a main carbon source, the promoter region of one of the two alcohol oxidase genes (AOX1) is highly active. In the presence of methanol, alcohol oxidase produced from the AOX1 gene comprises up to approximately 30% of the total soluble protein in Pichia pastoris. See Ellis, S. B., et al., Mol. Cell. Biol. 5:1111-21 (1985); Koutz, P. J, et al, Yeast 5:167-77 (1989); Tschopp, J. F., et al, Nucl. Acids Res. 15:3859-76 (1987). Thus, a heterologous coding sequence, such as, for example, a polynucleotide of the present invention, under the transcriptional regulation of all or part of the AOX1 regulatory sequence is expressed at exceptionally high levels in Pichia yeast grown in the presence of methanol.

[0255] In one example, the plasmid vector pPIC9K is used to express DNA encoding a polypeptide of the invention, as set forth herein, in a Pichea yeast system essentially as described in “Pichia Protocols: Methods in Molecular Biology,” D. R. Higgins and J. Cregg, eds. The Humana Press, Totowa, N.J., 1998. This expression vector allows expression and secretion of a polypeptide of the invention by virtue of the strong AOX1 promoter linked to the Pichia pastoris alkaline phosphatase (PHO) secretory signal peptide (i.e., leader) located upstream of a multiple cloning site.

[0256] Many other yeast vectors could be used in place of pPIC9K, such as, pYES2, pYD1, pTEF1/Zeo, pYES2/GS, pPICZ, pGAPZ, pGAPZalpha, pPIC9, pPIC3.5, pHIL-D2, pHIL-S1, pPIC3.5K, and PAO815, as one skilled in the art would readily appreciate, as long as the proposed expression construct provides appropriately located signals for transcription, translation, secretion (if desired), and the like, including an in-frame AUG as required.

[0257] In another embodiment, high-level expression of a heterologous coding sequence, such as, for example, a polynucleotide of the present invention, may be achieved by cloning the heterologous polynucleotide of the invention into an expression vector such as, for example, pGAPZ or pGAPZalpha, and growing the yeast culture in the absence of methanol.

[0258] In addition to encompassing host cells containing the vector constructs discussed herein, the invention also encompasses primary, secondary, and immortalized host cells of vertebrate origin, particularly mammalian origin, that have been engineered to delete or replace endogenous genetic material (e.g., coding sequence), and/or to include genetic material (e.g., heterologous polynucleotide sequences) that is operably associated with polynucleotides of the invention, and which activates, alters, and/or amplifies endogenous polynucleotides. For example, techniques known in the art may be used to operably associate heterologous control regions (e.g., promoter and/or enhancer) and endogenous polynucleotide sequences via homologous recombination (see, e.g., U.S. Pat. No. 5,641,670, issued Jun. 24, 1997; International Publication No. WO 96/29411, published Sep. 26, 1996; International Publication No. WO 94/12650, published Aug. 4, 1994; Koller et al., Proc. Natl. Acad. Sci. USA 86:8932-8935 (1989); and Zijlstra et al., Nature 342:435-438 (1989), the disclosures of each of which are incorporated by reference in their entireties).

[0259] In addition, polypeptides of the invention can be chemically synthesized using techniques known in the art (e.g., see Creighton, 1983, Proteins: Structures and Molecular Principles, W.H. Freeman & Co., N.Y., and Hunkapiller et al., Nature, 310:105-111 (1984)). For example, a polypeptide corresponding to a fragment of a polypeptide can be synthesized by use of a peptide synthesizer. Furthermore, if desired, nonclassical amino acids or chemical amino acid analogs can be introduced as a substitution or addition into the polypeptide sequence. Non-classical amino acids include, but are not limited to, to the D-isomers of the common amino acids, 2,4-diaminobutyric acid, a-amino isobutyric acid, 4-aminobutyric acid, Abu, 2-amino butyric acid, g-Abu, e-Ahx, 6-amino hexanoic acid, Aib, 2-amino isobutyric acid, 3-amino propionic acid, omithine, norleucine, norvaline, hydroxyproline, sarcosine, citrulline, homocitrulline, cysteic acid, t-butylglycine, t-butylalanine, phenylglycine, cyclohexylalanine, b-alanine, fluoro-amino acids, designer amino acids such as b-methyl amino acids, Ca-methyl amino acids, Na-methyl amino acids, and amino acid analogs in general. Furthermore, the amino acid can be D (dextrorotary) or L (levorotary).

[0260] The invention encompasses polypeptides of the present invention which are differentially modified during or after translation, e.g., by glycosylation, acetylation, phosphorylation, amidation, derivatization by known protecting/blocking groups, proteolytic cleavage, linkage to an antibody molecule or other cellular ligand, etc. Any of numerous chemical modifications may be carried out by known techniques, including but not limited, to specific chemical cleavage by cyanogen bromide, trypsin, chymotrypsin, papain, V8 protease, NaBH₄; acetylation, formylation, oxidation, reduction; metabolic synthesis in the presence of tunicamycin; etc.

[0261] Additional post-translational modifications encompassed by the invention include, for example, e.g., N-linked or O-linked carbohydrate chains, processing of N-terminal or C-terminal ends), attachment of chemical moieties to the amino acid backbone, chemical modifications of N-linked or O-linked carbohydrate chains, and addition or deletion of an N-terminal methionine residue as a result of procaryotic host cell expression. The polypeptides may also be modified with a detectable label, such as an enzymatic, fluorescent, isotopic or affinity label to allow for detection and isolation of the protein.

[0262] Examples of suitable enzymes include horseradish peroxidase, alkaline phosphatase, beta-galactosidase, or acetylcholinesterase; examples of suitable prosthetic group complexes include streptavidin/biotin and avidin/biotin; examples of suitable fluorescent materials include umbelliferone, fluorescein, fluorescein isothiocyanate, rhodamine, dichlorotriazinylamine fluorescein, dansyl chloride or phycoerythrin; an example of a luminescent material includes luminol; examples of bioluminescent materials include luciferase, luciferin, and aequorin; and examples of suitable radioactive material include iodine (¹²¹I, ¹²³I, ¹²⁵I, ¹³¹I), carbon (¹⁴C), sulfur (³⁵S), tritium (³H), indium (¹¹¹In, ¹¹²In, ^{113m}In, ^{115m}In), technetium (⁹⁹Tc, ^{99m}Tc), thallium (²⁰¹Ti), gallium (⁶⁸Ga, ⁶⁷Ga), palladium (¹⁰³Pd), molybdenum (⁹⁹Mo), xenon (¹³³Xe), fluorine (¹⁸F), ¹⁵³Sm, ¹⁷⁷Lu, ¹⁵⁹Gd, ¹⁴⁹Pm, ¹⁴⁰La, ¹⁷⁵Yb, ¹⁶⁶Ho, ⁹⁰Y, ⁴⁷Sc, ¹⁸⁶Re, ¹⁸⁸Re, ¹⁴²Pr, ¹⁰⁵Rh, and ⁹⁷Ru.

[0263] In specific embodiments, a polypeptide of the present invention or fragment or variant thereof is attached to macrocyclic chelators that associate with radiometal ions, including but not limited to, ¹⁷⁷Lu, ⁹⁰Y, ¹⁶⁶Ho, and ¹⁵³Sm, to polypeptides. In a preferred embodiment, the radiometal ion associated with the macrocyclic chelators is ¹¹¹In. In another preferred embodiment, the radiometal ion associated with the macrocyclic chelator is ⁹⁰Y. In specific embodiments, the macrocyclic chelator is 1,4,7,10-tetraazacyclododecane-N,N′,N″,N′″-tetraacetic acid (DOTA). In other specific embodiments, DOTA is attached to an antibody of the invention or fragment thereof via a linker molecule. Examples of linker molecules useful for conjugating DOTA to a polypeptide are commonly known in the art—see, for example, DeNardo et al., Clin Cancer Res. 4(10):2483-90 (1998); Peterson et al., Bioconjug. Chem. 10(4):553-7 (1999); and Zimmerman et al, Nucl. Med. Biol. 26(8):943-50 (1999); which are hereby incorporated by reference in their entirety.

[0264] As mentioned, the proteins of the invention may be modified by either natural processes, such as posttranslational processing, or by chemical modification techniques which are well known in the art. It will be appreciated that the same type of modification may be present in the same or varying degrees at several sites in a given polypeptide. Polypeptides of the invention may be branched, for example, as a result of ubiquitination, and they may be cyclic, with or without branching. Cyclic, branched, and branched cyclic polypeptides may result from posttranslation natural processes or may be made by synthetic methods. Modifications include acetylation, acylation, ADP-ribosylation, amidation, covalent attachment of flavin, covalent attachment of a heme moiety, covalent attachment of a nucleotide or nucleotide derivative, covalent attachment of a lipid or lipid derivative, covalent attachment of phosphotidylinositol, cross-linking, cyclization, disulfide bond formation, demethylation, formation of covalent cross-links, formation of cysteine, formation of pyroglutamate, formylation, gamma-carboxylation, glycosylation, GPI anchor formation, hydroxylation, iodination, methylation, myristoylation, oxidation, pegylation, proteolytic processing, phosphorylation, prenylation, racemization, selenoylation, sulfation, transfer-RNA mediated addition of amino acids to proteins such as arginylation, and ubiquitination. (See, for instance, PROTEINS—STRUCTURE AND MOLECULAR PROPERTES, 2nd Ed., T. E. Creighton, W. H. Freeman and Company, New York (1993); POSTTRANSLATIONAL COVALENT MODIFICATION OF PROTEINS, B. C. Johnson, Ed., Academic Press, New York, pgs. 1-12 (1983); Seifter et al., Meth. Enzymol. 182:626-646 (1990); Rattan et al., Ann. N.Y. Acad. Sci. 663:48-62 (1992)).

[0265] Also provided by the invention are chemically modified derivatives of the polypeptides of the invention which may provide additional advantages such as increased solubility, stability and circulating time of the polypeptide, or decreased immunogenicity (see U.S. Pat. No. 4,179,337). The chemical moieties for derivitization may be selected from water soluble polymers such as polyethylene glycol, ethylene glycol/propylene glycol copolymers, carboxymethylcellulose, dextran, polyvinyl alcohol and the like. The polypeptides may be modified at random positions within the molecule, or at predetermined positions within the molecule and may include one, two, three or more attached chemical moieties.

[0266] The polymer may be of any molecular weight, and may be branched or unbranched. For polyethylene glycol, the preferred molecular weight is between about 1 kDa and about 100 kDa (the term “about” indicating that in preparations of polyethylene glycol, some molecules will weigh more, some less, than the stated molecular weight) for ease in handling and manufacturing. Other sizes may be used, depending on the desired therapeutic profile (e.g., the duration of sustained release desired, the effects, if any on biological activity, the ease in handling, the degree or lack of antigenicity and other known effects of the polyethylene glycol to a therapeutic protein or analog). For example, the polyethylene glycol may have an average molecular weight of about 200, 500, 1000, 1500, 2000, 2500, 3000, 3500, 4000, 4500, 5000, 5500, 6000, 6500, 7000, 7500, 8000, 8500, 9000, 9500, 10,000, 10,500, 11,000, 11,500, 12,000, 12,500, 13,000, 13,500, 14,000, 14,500, 15,000, 15,500, 16,000, 16,500, 17,000, 17,500, 18,000, 18,500, 19,000, 19,500, 20,000, 25,000, 30,000, 35,000, 40,000, 45,000, 50,000, 55,000, 60,000, 65,000, 70,000, 75,000, 80,000, 85,000, 90,000, 95,000, or 100,000 kDa.

[0267] As noted above, the polyethylene glycol may have a branched structure. Branched polyethylene glycols are described, for example, in U.S. Pat. No. 5,643,575; Morpurgo et al., Appl. Biochem. Biotechnol. 56:59-72 (1996); Vorobjev et al., Nucleosides Nucleotides 18:2745-2750 (1999); and Caliceti et al., Bioconjug. Chem. 10:638-646 (1999), the disclosures of each of which are incorporated herein by reference.

[0268] The polyethylene glycol molecules (or other chemical moieties) should be attached to the protein with consideration of effects on functional or antigenic domains of the protein. There are a number of attachment methods available to those skilled in the art, such as, for example, the method disclosed in EP 0 401 384 (coupling PEG to G-CSF), herein incorporated by reference; see also Malik et al., Exp. Hematol. 20:1028-1035 (1992), reporting pegylation of GM-CSF using tresyl chloride. For example, polyethylene glycol may be covalently bound through amino acid residues via a reactive group, such as a free amino or carboxyl group. Reactive groups are those to which an activated polyethylene glycol molecule may be bound. The amino acid residues having a free amino group may include lysine residues and the N-terminal amino acid residues; those having a free carboxyl group may include aspartic acid residues glutamic acid residues and the C-terminal amino acid residue. Sulfhydryl groups may also be used as a reactive group for attaching the polyethylene glycol molecules. Preferred for therapeutic purposes is attachment at an amino group, such as attachment at the N-terminus or lysine group.

[0269] As suggested above, polyethylene glycol may be attached to proteins via linkage to any of a number of amino acid residues. For example, polyethylene glycol can be linked to proteins via covalent bonds to lysine, histidine, aspartic acid, glutamic acid, or cysteine residues. One or more reaction chemistries may be employed to attach polyethylene glycol to specific amino acid residues (e.g., lysine, histidine, aspartic acid, glutamic acid, or cysteine) of the protein or to more than one type of amino acid residue (e.g., lysine, histidine, aspartic acid, glutamic acid, cysteine and combinations thereof) of the protein.

[0270] One may specifically desire proteins chemically modified at the N-terminus. Using polyethylene glycol as an illustration of the present composition, one may select from a variety of polyethylene glycol molecules (by molecular weight, branching, etc.), the proportion of polyethylene glycol molecules to protein (polypeptide) molecules in the reaction mix, the type of pegylation reaction to be performed, and the method of obtaining the selected N-terminally pegylated protein. The method of obtaining the N-terminally pegylated preparation (i.e., separating this moiety from other monopegylated moieties if necessary) may be by purification of the N-terminally pegylated material from a population of pegylated protein molecules. Selective proteins chemically modified at the N-terminus modification may be accomplished by reductive alkylation, which exploits differential reactivity of different types of primary amino groups (lysine versus the N-terminal) available for derivatization in a particular protein. Under the appropriate reaction conditions, substantially selective derivatization of the protein at the N-terminus with a carbonyl group containing polymer is achieved.

[0271] As indicated above, pegylation of the proteins of the invention may be accomplished by any number of means. For example, polyethylene glycol may be attached to the protein either directly or by an intervening linker. Linkerless systems for attaching polyethylene glycol to proteins are described in Delgado et al., Crit. Rev. Thera. Drug Carrier Sys. 9:249-304 (1992); Francis et al., Intern. J. of Hematol. 68:1-18 (1998); U.S. Pat. No. 4,002,531; U.S. Pat. No. 5,349,052; WO 95/06058; and WO 98/32466, the disclosures of each of which are incorporated herein by reference.

[0272] One system for attaching polyethylene glycol directly to amino acid residues of proteins without an intervening linker employs tresylated MPEG, which is produced by the modification of monmethoxy polyethylene glycol (MPEG) using tresylchloride (ClSO₂CH₂CF₃). Upon reaction of protein with tresylated MPEG, polyethylene glycol is directly attached to amine groups of the protein. Thus, the invention includes protein-polyethylene glycol conjugates produced by reacting proteins of the invention with a polyethylene glycol molecule having a 2,2,2-trifluoreothane sulphonyl group.

[0273] Polyethylene glycol can also be attached to proteins using a number of different intervening linkers. For example, U.S. Pat. No. 5,612,460, the entire disclosure of which is incorporated herein by reference, discloses urethane linkers for connecting polyethylene glycol to proteins. Protein-polyethylene glycol conjugates wherein the polyethylene glycol is attached to the protein by a linker can also be produced by reaction of proteins with compounds such as MPEG-succinimidylsuccinate, MPEG activated with 1,1′-carbonyldiimidazole, MPEG-2,4,5-trichloropenylcarbonate, MPEG-p-nitrophenolcarbonate, and various MPEG-succinate derivatives. A number of additional polyethylene glycol derivatives and reaction chemistries for attaching polyethylene glycol to proteins are described in International Publication No. WO 98/32466, the entire disclosure of which is incorporated herein by reference. Pegylated protein products produced using the reaction chemistries set out herein are included within the scope of the invention.

[0274] The number of polyethylene glycol moieties attached to each protein of the invention (i.e., the degree of substitution) may also vary. For example, the pegylated proteins of the invention may be linked, on average, to 1, 2, 3, 4, 5, 6, 7, 8, 9, 10, 12, 15, 17, 20, or more polyethylene glycol molecules. Similarly, the average degree of substitution within ranges such as 1-3, 2-4, 3-5, 4-6, 5-7, 6-8, 7-9, 8-10, 9-11, 10-12, 11-13, 12-14, 13-15, 14-16, 15-17, 16-18, 17-19, or 18-20 polyethylene glycol moieties per protein molecule. Methods for determining the degree of substitution are discussed, for example, in Delgado et al., Crit. Rev. Thera. Drug Carrier Sys. 9:249-304 (1992).

[0275] The polypeptides of the invention can be recovered and purified from chemical synthesis and recombinant cell cultures by standard methods which include, but are not limited to, ammonium sulfate or ethanol precipitation, acid extraction, anion or cation exchange chromatography, phosphocellulose chromatography, hydrophobic interaction chromatography, affinity chromatography, hydroxylapatite chromatography and lectin chromatography. Most preferably, high performance liquid chromatography (“HPLC”) is employed for purification. Well-known techniques for refolding protein may be employed to regenerate active conformation when the polypeptide is denatured during isolation and/or purification.

[0276] The polypeptides of the invention may be in monomers or multimers (i.e., dimers, trimers, tetramers and higher multimers). Accordingly, the present invention relates to monomers and multimers of the polypeptides of the invention, their preparation, and compositions (preferably, Therapeutics) containing them. In specific embodiments, the polypeptides of the invention are monomers, dimers, trimers or tetramers. In additional embodiments, the multimers of the invention are at least dimers, at least trimers, or at least tetramers.

[0277] Multimers encompassed by the invention may be homomers or heteromers. As used herein, the term homomer refers to a multimer containing only polypeptides corresponding to a protein of the invention (e.g., the amino acid sequence of SEQ ID NO:Y, an amino acid sequence encoded by SEQ ID NO:X or the complement of SEQ ID NO:X, the amino acid sequence encoded by the portion of SEQ ID NO:X as defined in columns 8 and 9 of Table 2, and/or an amino acid sequence encoded by cDNA contained in ATCC Deposit No: Z (including fragments, variants, splice variants, and fusion proteins, corresponding to these as described herein)). These homomers may contain polypeptides having identical or different amino acid sequences. In a specific embodiment, a homomer of the invention is a multimer containing only polypeptides having an identical amino acid sequence. In another specific embodiment, a homomer of the invention is a multimer containing polypeptides having different amino acid sequences. In specific embodiments, the multimer of the invention is a homodimer (e.g., containing two polypeptides having identical or different amino acid sequences) or a homotrimer (e.g., containing three polypeptides having identical and/or different amino acid sequences). In additional embodiments, the homomeric multimer of the invention is at least a homodimer, at least a homotrimer, or at least a homotetramer.

[0278] As used herein, the term heteromer refers to a multimer containing one or more heterologous polypeptides (i.e., polypeptides of different proteins) in addition to the polypeptides of the invention. In a specific embodiment, the multimer of the invention is a heterodimer, a heterotrimer, or a heterotetramer. In additional embodiments, the heteromeric multimer of the invention is at least a heterodimer, at least a heterotrimer, or at least a heterotetramer.

[0279] Multimers of the invention may be the result of hydrophobic, hydrophilic, ionic and/or covalent associations and/or may be indirectly linked by, for example, liposome formation. Thus, in one embodiment, multimers of the invention, such as, for example, homodimers or homotrimers, are formed when polypeptides of the invention contact one another in solution. In another embodiment, heteromultimers of the invention, such as, for example, heterotrimers or heterotetramers, are formed when polypeptides of the invention contact antibodies to the polypeptides of the invention (including antibodies to the heterologous polypeptide sequence in a fusion protein of the invention) in solution. In other embodiments, multimers of the invention are formed by covalent associations with and/or between the polypeptides of the invention. Such covalent associations may involve one or more amino acid residues contained in the polypeptide sequence (e.g., that recited in SEQ ID NO:Y, encoded by the portion of SEQ ID NO:X as defined in columns 8 and 9 of Table 2, and/or encoded by the cDNA contained in ATCC Deposit No: Z). In one instance, the covalent associations are cross-linking between cysteine residues located within the polypeptide sequences that interact in the native (i.e., naturally occurring) polypeptide. In another instance, the covalent associations are the consequence of chemical or recombinant manipulation. Alternatively, such covalent associations may involve one or more amino acid residues contained in the heterologous polypeptide sequence in a fusion protein. In one example, covalent associations are between the heterologous sequence contained in a fusion protein of the invention (see, e.g., U.S. Pat. No. 5,478,925). In a specific example, the covalent associations are between the heterologous sequence contained in a Fc fusion protein of the invention (as described herein). In another specific example, covalent associations of fusion proteins of the invention are between heterologous polypeptide sequence from another protein that is capable of forming covalently associated multimers, such as for example, osteoprotegerin (see, e.g., International Publication NO: WO 98/49305, the contents of which are herein incorporated by reference in its entirety). In another embodiment, two or more polypeptides of the invention are joined through peptide linkers. Examples include those peptide linkers described in U.S. Pat. No. 5,073,627 (hereby incorporated by reference). Proteins comprising multiple polypeptides of the invention separated by peptide linkers may be produced using conventional recombinant DNA technology.

[0280] Another method for preparing multimer polypeptides of the invention involves use of polypeptides of the invention fused to a leucine zipper or isoleucine zipper polypeptide sequence. Leucine zipper and isoleucine zipper domains are polypeptides that promote multimerization of the proteins in which they are found. Leucine zippers were originally identified in several DNA-binding proteins (Landschulz et al., Science 240:1759, (1988)), and have since been found in a variety of different proteins. Among the known leucine zippers are naturally occurring peptides and derivatives thereof that dimerize or trimerize. Examples of leucine zipper domains suitable for producing soluble multimeric proteins of the invention are those described in PCT application WO 94/10308, hereby incorporated by reference. Recombinant fusion proteins comprising a polypeptide of the invention fused to a polypeptide sequence that dimerizes or trimerizes in solution are expressed in suitable host cells, and the resulting soluble multimeric fusion protein is recovered from the culture supernatant using techniques known in the art.

[0281] Trimeric polypeptides of the invention may offer the advantage of enhanced biological activity. Preferred leucine zipper moieties and isoleucine moieties are those that preferentially form trimers. One example is a leucine zipper derived from lung surfactant protein D (SPD), as described in Hoppe et al. (FEBS Letters 344:191, (1994)) and in U.S. patent application Ser. No. 08/446,922, hereby incorporated by reference. Other peptides derived from naturally occurring trimeric proteins may be employed in preparing trimeric polypeptides of the invention.

[0282] In another example, proteins of the invention are associated by interactions between Flag® polypeptide sequence contained in fusion proteins of the invention containing Flag® polypeptide sequence. In a further embodiment, proteins of the invention are associated by interactions between heterologous polypeptide sequence contained in Flag® fusion proteins of the invention and anti-Flag® antibody.

[0283] The multimers of the invention may be generated using chemical techniques known in the art. For example, polypeptides desired to be contained in the multimers of the invention may be chemically cross-linked using linker molecules and linker molecule length optimization techniques known in the art (see, e.g., U.S. Pat. No. 5,478,925, which is herein incorporated by reference in its entirety). Additionally, multimers of the invention may be generated using techniques known in the art to form one or more inter-molecule cross-links between the cysteine residues located within the sequence of the polypeptides desired to be contained in the multimer (see, e.g., U.S. Pat. No. 5,478,925, which is herein incorporated by reference in its entirety). Further, polypeptides of the invention may be routinely modified by the addition of cysteine or biotin to the C-terminus or N-terminus of the polypeptide and techniques known in the art may be applied to generate multimers containing one or more of these modified polypeptides (see, e.g., U.S. Pat. No. 5,478,925, which is herein incorporated by reference in its entirety). Additionally, techniques known in the art may be applied to generate liposomes containing the polypeptide components desired to be contained in the multimer of the invention (see, e.g., U.S. Pat. No. 5,478,925, which is herein incorporated by reference in its entirety).

[0284] Alternatively, multimers of the invention may be generated using genetic engineering techniques known in the art. In one embodiment, polypeptides contained in multimers of the invention are produced recombinantly using fusion protein technology described herein or otherwise known in the art (see, e.g., U.S. Pat. No. 5,478,925, which is herein incorporated by reference in its entirety). In a specific embodiment, polynucleotides coding for a homodimer of the invention are generated by ligating a polynucleotide sequence encoding a polypeptide of the invention to a sequence encoding a linker polypeptide and then further to a synthetic polynucleotide encoding the translated product of the polypeptide in the reverse orientation from the original C-terminus to the N-terminus (lacking the leader sequence) (see, e.g., U.S. Pat. No. 5,478,925, which is herein incorporated by reference in its entirety). In another embodiment, recombinant techniques described herein or otherwise known in the art are applied to generate recombinant polypeptides of the invention which contain a transmembrane domain (or hydrophobic or signal peptide) and which can be incorporated by membrane reconstitution techniques into liposomes (see, e.g., U.S. Pat. No. 5,478,925, which is herein incorporated by reference in its entirety).

Antibodies

[0285] Further polypeptides of the invention relate to antibodies and T-cell antigen receptors (TCR) which immunospecifically bind a polypeptide, polypeptide fragment, or variant of the invention (e.g., a polypeptide or fragment or variant of the amino acid sequence of SEQ ID NO:Y or a polypeptide encoded by the cDNA contained in ATCC Deposit No: Z, and/or an epitope, of the present invention) as determined by immunoassays well known in the art for assaying specific antibody-antigen binding. Antibodies of the invention include, but are not limited to, polyclonal, monoclonal, multispecific, human, humanized or chimeric antibodies, single chain antibodies, Fab fragments, F(ab′) fragments, fragments produced by a Fab expression library, anti-idiotypic (anti-Id) antibodies (including, e.g., anti-Id antibodies to antibodies of the invention), intracellularly-made antibodies (i.e., intrabodies), and epitope-binding fragments of any of the above. The term “antibody,” as used herein, refers to immunoglobulin molecules and immunologically active portions of immunoglobulin molecules, i.e., molecules that contain an antigen binding site that immunospecifically binds an antigen. The immunoglobulin molecules of the invention can be of any type (e.g., IgG, IgE, IgM, IgD, IgA and IgY), class (e.g., IgG1, IgG2, IgG3, IgG4, IgA1 and IgA2) or subclass of immunoglobulin molecule. In preferred embodiments, the immunoglobulin molecules of the invention are IgG1. In other preferred embodiments, the immunoglobulin molecules of the invention are IgG4.

[0286] Most preferably the antibodies are human antigen-binding antibody fragments of the present invention and include, but are not limited to, Fab, Fab′ and F(ab′)2, Fd, single-chain Fvs (scFv), single-chain antibodies, disulfide-linked Fvs (sdFv) and fragments comprising either a VL or VH domain. Antigen-binding antibody fragments, including single-chain antibodies, may comprise the variable region(s) alone or in combination with the entirety or a portion of the following: hinge region, CH1, CH2, and CH3 domains. Also included in the invention are antigen-binding fragments also comprising any combination of variable region(s) with a hinge region, CH1, CH2, and CH3 domains. The antibodies of the invention may be from any animal origin including birds and mammals. Preferably, the antibodies are human, murine (e.g., mouse and rat), donkey, ship rabbit, goat, guinea pig, camel, horse, or chicken. As used herein, “human” antibodies include antibodies having the amino acid sequence of a human immunoglobulin and include antibodies isolated from human immunoglobulin libraries or from animals transgenic for one or more human immunoglobulin and that do not express endogenous immunoglobulins, as described infra and, for example in, U.S. Pat. No. 5,939,598 by Kucherlapati et al.

[0287] The antibodies of the present invention may be monospecific, bispecific, trispecific or of greater multispecificity. Multispecific antibodies may be specific for different epitopes of a polypeptide of the present invention or may be specific for both a polypeptide of the present invention as well as for a heterologous epitope, such as a heterologous polypeptide or solid support material. See, e.g., PCT publications WO 93/17715; WO 92/08802; WO 91/00360; WO 92/05793; Tutt, et al., J. Immunol. 147:60-69 (1991); U.S. Pat. Nos. 4,474,893; 4,714,681; 4,925,648; 5,573,920; 5,601,819; Kostelny et al., J. Immunol. 148:1547-1553 (1992).

[0288] Antibodies of the present invention may be described or specified in terms of the epitope(s) or portion(s) of a polypeptide of the present invention that they recognize or specifically bind. The epitope(s) or polypeptide portion(s) may be specified as described herein, e.g., by N-terminal and C-terminal positions, or by size in contiguous amino acid residues, or listed in the Tables and Figures. Preferred epitopes of the invention include the predicted epitopes shown in Table 1B, as well as polynucleotides that encode these epitopes. Antibodies that specifically bind any epitope or polypeptide of the present invention may also be excluded. Therefore, the present invention includes antibodies that specifically bind polypeptides of the present invention, and allows for the exclusion of the same.

[0289] Antibodies of the present invention may also be described or specified in terms of their cross-reactivity. Antibodies that do not bind any other analog, ortholog, or homolog of a polypeptide of the present invention are included. Antibodies that bind polypeptides with at least 95%, at least 90%, at least 85%, at least 80%, at least 75%, at least 70%, at least 65%, at least 60%, at least 55%, and at least 50% identity (as calculated using methods known in the art and described herein) to a polypeptide of the present invention are also included in the present invention. In specific embodiments, antibodies of the present invention cross-react with murine, rat and/or rabbit homologs of human proteins and the corresponding epitopes thereof. Antibodies that do not bind polypeptides with less than 95%, less than 90%, less than 85%, less than 80%, less than 75%, less than 70%, less than 65%, less than 60%, less than 5%, and less than 50% identity (as calculated using methods known in the art and described herein) to a polypeptide of the present invention are also included in the present invention. In a specific embodiment, the above-described cross-reactivity is with respect to any single specific antigenic or immunogenic polypeptide, or combination(s) of 2, 3, 4, 5, or more of the specific antigenic and/or immunogenic polypeptides disclosed herein. Further included in the present invention are antibodies that bind polypeptides encoded by polynucleotides that hybridize to a polynucleotide of the present invention under stringent hybridization conditions (as described herein). Antibodies of the present invention may also be described or specified in terms of their binding affinity to a polypeptide of the invention. Preferred binding affinities include those with a dissociation constant or Kd less than 5×10⁻² M, 10⁻² M, 5×10⁻³ M, 10⁻³ M, 5×10⁻⁴M, 10⁻⁴ M, 5×10⁻⁵ M, 10⁻⁵ M, 5×10⁻⁶ M, 10⁻⁶M, 5×10⁻⁷ M, 10⁷ M, 5×10⁻⁸ M, 10⁻⁸ M, 5×10⁻⁹ M, 10⁻⁹ M, 5×10⁻¹⁰ M, 10⁻¹⁰ M, 5×10⁻¹¹ M, 10⁻¹¹ M, 5×10⁻¹² M, 10⁻¹² M, 5×10⁻¹³ M, 10⁻¹³ M, 5×10⁻¹⁴ M, 10⁻¹⁴ M, 5×10⁻¹⁵ M, or 10⁻¹⁵ M.

[0290] The invention also provides antibodies that competitively inhibit binding of an antibody to an epitope of the invention as determined by any method known in the art for determining competitive binding, for example, the immunoassays described herein. In preferred embodiments, the antibody competitively inhibits binding to the epitope by at least 95%, at least 90%, at least 85%, at least 80%, at least 75%, at least 70%, at least 60%, or at least 50%.

[0291] Antibodies of the present invention may act as agonists or antagonists of the polypeptides of the present invention. For example, the present invention includes antibodies that disrupt the receptor/ligand interactions with the polypeptides of the invention either partially or fully. Preferably, antibodies of the present invention bind an antigenic epitope disclosed herein, or a portion thereof. The invention features both receptor-specific antibodies and ligand-specific antibodies. The invention also features receptor-specific antibodies that do not prevent ligand binding but prevent receptor activation. Receptor activation (i.e., signaling) may be determined by techniques described herein or otherwise known in the art. For example, receptor activation can be determined by detecting the phosphorylation (e.g., tyrosine or serine/threonine) of the receptor or its substrate by immunoprecipitation followed by western blot analysis (for example, as described supra). In specific embodiments, antibodies are provided that inhibit ligand activity or receptor activity by at least 95%, at least 90%, at least 85%, at least 80%, at least 75%, at least 70%, at least 60%, or at least 50% of the activity in absence of the antibody.

[0292] The invention also features receptor-specific antibodies which both prevent ligand binding and receptor activation as well as antibodies that recognize the receptor-ligand complex, and, preferably, do not specifically recognize the unbound receptor or the unbound ligand. Likewise, included in the invention are neutralizing antibodies that bind the ligand and prevent binding of the ligand to the receptor, as well as antibodies that bind the ligand, thereby preventing receptor activation, but do not prevent the ligand from binding the receptor. Further included in the invention are antibodies that activate the receptor. These antibodies may act as receptor agonists, i.e., potentiate or activate either all or a subset of the biological activities of the ligand-mediated receptor activation, for example, by inducing dimerization of the receptor. The antibodies may be specified as agonists, antagonists or inverse agonists for biological activities comprising the specific biological activities of the peptides of the invention disclosed herein. The above antibody agonists can be made using methods known in the art. See, e.g., PCT publication WO 96/40281; U.S. Pat. No. 5,811,097; Deng et al., Blood 92(6):1981-1988 (1998); Chen et al., Cancer Res. 58(16):3668-3678 (1998); Harrop et al., J. Immunol. 161(4):1786-1794 (1998); Zhu et al., Cancer Res. 58(15):3209-3214 (1998); Yoon et al., J. Immunol. 160(7):3170-3179 (1998); Prat et al., J. Cell. Sci. 111(Pt2):237-247 (1998); Pitard et al., J. Immunol. Methods 205(2):177-190 (1997); Liautard et al., Cytokine 9(4):233-241 (1997); Carlson et al., J. Biol. Chem. 272(17):11295-11301 (1997); Taryman et al., Neuron 14(4):755-762 (1995); Muller et al., Structure 6(9):1153-1167 (1998); Bartunek et al., Cytokine 8(1):14-20 (1996) (which are all incorporated by reference herein in their entireties).

[0293] Antibodies of the present invention may be used, for example, to purify, detect, and target the polypeptides of the present invention, including both in vitro and in vivo diagnostic and therapeutic methods. For example, the antibodies have utility in immunoassays for qualitatively and quantitatively measuring levels of the polypeptides of the present invention in biological samples. See, e.g., Harlow et al., Antibodies: A Laboratory Manual, (Cold Spring Harbor Laboratory Press, 2nd ed. 1988); incorporated by reference herein in its entirety.

[0294] As discussed in more detail below, the antibodies of the present invention may be used either alone or in combination with other compositions. The antibodies may further be recombinantly fused to a heterologous polypeptide at the N- or C-terminus or chemically conjugated (including covalent and non-covalent conjugations) to polypeptides or other compositions. For example, antibodies of the present invention may be recombinantly fused or conjugated to molecules useful as labels in detection assays and effector molecules such as heterologous polypeptides, drugs, radionuclides, or toxins. See, e.g., PCT publications WO 92/08495; WO 91/14438; WO 89/12624; U.S. Pat. No. 5,314,995; and EP 396,387; the disclosures of which are incorporated herein by reference in their entireties.

[0295] The antibodies of the invention include derivatives that are modified, i.e, by the covalent attachment of any type of molecule to the antibody such that covalent attachment does not prevent the antibody from generating an anti-idiotypic response. For example, but not by way of limitation, the antibody derivatives include antibodies that have been modified, e.g., by glycosylation, acetylation, pegylation, phosphylation, amidation, derivatization by known protecting/blocking groups, proteolytic cleavage, linkage to a cellular ligand or other protein, etc. Any of numerous chemical modifications may be carried out by known techniques, including, but not limited to specific chemical cleavage, acetylation, formylation, metabolic synthesis of tunicamycin, etc. Additionally, the derivative may contain one or more non-classical amino acids.

[0296] The antibodies of the present invention may be generated by any suitable method known in the art. Polyclonal antibodies to an antigen-of-interest can be produced by various procedures well known in the art. For example, a polypeptide of the invention can be administered to various host animals including, but not limited to, rabbits, mice, rats, etc. to induce the production of sera containing polyclonal antibodies specific for the antigen. Various adjuvants may be used to increase the immunological response, depending on the host species, and include but are not limited to, Freund's (complete and incomplete), mineral gels such as aluminum hydroxide, surface active substances such as lysolecithin, pluronic polyols, polyanions, peptides, oil emulsions, keyhole limpet hemocyanins, dinitrophenol, and potentially useful human adjuvants such as BCG (bacille Calmette-Guerin) and corynebacterium parvum. Such adjuvants are also well known in the art.

[0297] Monoclonal antibodies can be prepared using a wide variety of techniques known in the art including the use of hybridoma, recombinant, and phage display technologies, or a combination thereof. For example, monoclonal antibodies can be produced using hybridoma techniques including those known in the art and taught, for example, in Harlow et al., Antibodies: A Laboratory Manual, (Cold Spring Harbor Laboratory Press, 2nd ed. 1988); Hammerling, et al., in: Monoclonal Antibodies and T-Cell Hybridomas 563-681 (Elsevier, N.Y., 1981) (said references incorporated by reference in their entireties). The term “monoclonal antibody” as used herein is not limited to antibodies produced through hybridoma technology. The term “monoclonal antibody” refers to an antibody that is derived from a single clone, including any eukaryotic, prokaryotic, or phage clone, and not the method by which it is produced.

[0298] Methods for producing and screening for specific antibodies using hybridoma technology are routine and well known in the art and are discussed in detail in the Examples. In a non-limiting example, mice can be immunized with a polypeptide of the invention or a cell expressing such peptide. Once an immune response is detected, e.g., antibodies specific for the antigen are detected in the mouse serum, the mouse spleen is harvested and splenocytes isolated. The splenocytes are then fused by well-known techniques to any suitable myeloma cells, for example cells from cell line SP20 available from the ATCC. Hybridomas are selected and cloned by limited dilution. The hybridoma clones are then assayed by methods known in the art for cells that secrete antibodies capable of binding a polypeptide of the invention. Ascites fluid, which generally contains high levels of antibodies, can be generated by immunizing mice with positive hybridoma clones.

[0299] Accordingly, the present invention provides methods of generating monoclonal antibodies as well as antibodies produced by the method comprising culturing a hybridoma cell secreting an antibody of the invention wherein, preferably, the hybridoma is generated by fusing splenocytes isolated from a mouse immunized with an antigen of the invention with myeloma cells and then screening the hybridomas resulting from the fusion for hybridoma clones that secrete an antibody able to bind a polypeptide of the invention.

[0300] Another well-known method for producing both polyclonal and monoclonal human B cell lines is transformation using Epstein Barr Virus (EBV). Protocols for generating EBV-transformed B cell lines are commonly known in the art, such as, for example, the protocol outlined in Chapter 7.22 of Current Protocols in Immunology, Coligan et al., Eds., 1994, John Wiley & Sons, NY, which is hereby incorporated in its entirety by reference. The source of B cells for transformation is commonly human peripheral blood, but B cells for transformation may also be derived from other sources including, but not limited to, lymph nodes, tonsil, spleen, tumor tissue, and infected tissues. Tissues are generally made into single cell suspensions prior to EBV transformation. Additionally, steps may be taken to either physically remove or inactivate T cells (e.g., by treatment with cyclosporin A) in B cell-containing samples, because T cells from individuals seropositive for anti-EBV antibodies can suppress B cell immortalization by EBV.

[0301] In general, the sample containing human B cells is innoculated with EBV, and cultured for 3-4 weeks. A typical source of EBV is the culture supernatant of the B95-8 cell line (ATCC #VR-1492). Physical signs of EBV transformation can generally be seen towards the end of the 3-4 week culture period. By phase-contrast microscopy, transformed cells may appear large, clear, hairy and tend to aggregate in tight clusters of cells. Initially, EBV lines are generally polyclonal. However, over prolonged periods of cell cultures, EBV lines may become monoclonal or polyclonal as a result of the selective outgrowth of particular B cell clones. Alternatively, polyclonal EBV transformed lines may be subcloned (e.g., by limiting dilution culture) or fused with a suitable fusion partner and plated at limiting dilution to obtain monoclonal B cell lines. Suitable fusion partners for EBV transformed cell lines include mouse myeloma cell lines (e.g., SP2/0, X63-Ag8.653), heteromyeloma cell lines (human×mouse; e.g, SPAM-8, SBC-H20, and CB-F7), and human cell lines (e.g., GM 1500, SKO-007, RPMI 8226, and KR-4). Thus, the present invention also provides a method of generating polyclonal or monoclonal human antibodies against polypeptides of the invention or fragments thereof, comprising EBV-transformation of human B cells.

[0302] Antibody fragments that recognize specific epitopes may be generated by known techniques. For example, Fab and F(ab′)2 fragments of the invention may be produced by proteolytic cleavage of immunoglobulin molecules, using enzymes such as papain (to produce Fab fragments) or pepsin (to produce F(ab′)2 fragments). F(ab′)2 fragments contain the variable region, the light chain constant region and the CH1 domain of the heavy chain.

[0303] For example, the antibodies of the present invention can also be generated using various phage display methods known in the art. In phage display methods, functional antibody domains are displayed on the surface of phage particles that carry the polynucleotide sequences encoding them. In a particular embodiment, such phage can be utilized to display antigen-binding domains expressed from a repertoire or combinatorial antibody library (e.g., human or murine). Phage expressing an antigen binding domain that binds the antigen of interest can be selected or identified with antigen, e.g., using labeled antigen or antigen bound or captured to a solid surface or bead. Phage used in these methods are typically filamentous phage including fd and M13 binding domains expressed from phage with Fab, Fv or disulfide stabilized Fv antibody domains recombinantly fused to either the phage gene III or gene VIII protein. Examples of phage display methods that can be used to make the antibodies of the present invention include those disclosed in Brinkman et al., J. Immunol. Methods 182:41-50 (1995); Ames et al., J. Immunol. Methods 184:177-186 (1995); Kettleborough et al., Eur. J. Immunol. 24:952-958 (1994); Persic et al., Gene 187 9-18 (1997); Burton et al., Advances in Immunology 57:191-280 (1994); PCT application No. PCT/GB91/01134; PCT publications WO 90/02809; WO 91/10737; WO 92/01047; WO 92/18619; WO 93/11236; WO 95/15982; WO 95/20401; and U.S. Pat. Nos. 5,698,426; 5,223,409; 5,403,484; 5,580,717; 5,427,908; 5,750,753; 5,821,047; 5,571,698; 5,427,908; 5,516,637; 5,780,225; 5,658,727; 5,733,743 and 5,969,108; each of which is incorporated herein by reference in its entirety.

[0304] As described in the above references, after phage selection, the antibody coding regions from the phage can be isolated and used to generate whole antibodies, including human antibodies, or any other desired antigen binding fragment, and expressed in any desired host, including mammalian cells, insect cells, plant cells, yeast, and bacteria, e.g., as described in detail below. For example, techniques to recombinantly produce Fab, Fab′ and F(ab′)2 fragments can also be employed using methods known in the art such as those disclosed in PCT publication WO 92/22324; Mullinax et al., BioTechniques 12(6):864-869 (1992); and Sawai et al., AJRI 34:26-34 (1995); and Better et al., Science 240:1041-1043 (1988) (said references incorporated by reference in their entireties).

[0305] Examples of techniques which can be used to produce single-chain Fvs and antibodies include those described in U.S. Pat. Nos. 4,946,778 and 5,258,498; Huston et al., Methods in Enzymology 203:46-88 (1991); Shu et al., PNAS 90:7995-7999 (1993); and Skerra et al., Science 240:1038-1040 (1988). For some uses, including in vivo use of antibodies in humans and in vitro detection assays, it may be preferable to use chimeric, humanized, or human antibodies. A chimeric antibody is a molecule in which different portions of the antibody are derived from different animal species, such as antibodies having a variable region derived from a murine monoclonal antibody and a human immunoglobulin constant region. Methods for producing chimeric antibodies are known in the art. See e.g., Morrison, Science 229:1202 (1985); Oi et al., BioTechniques 4:214 (1986); Gillies et al., (1989) J. Immunol. Methods 125:191-202; U.S. Pat. Nos. 5,807,715; 4,816,567; and 4,816397, which are incorporated herein by reference in their entirety. Humanized antibodies are antibody molecules from non-human species antibody that binds the desired antigen having one or more complementarity determining regions (CDRs) from the non-human species and framework regions from a human immunoglobulin molecule. Often, framework residues in the human framework regions will be substituted with the corresponding residue from the CDR donor antibody to alter, preferably improve, antigen binding. These framework substitutions are identified by methods well known in the art, e.g., by modeling of the interactions of the CDR and framework residues to identify framework residues important for antigen binding and sequence comparison to identify unusual framework residues at particular positions. (See, e.g., Queen et al., U.S. Pat. No. 5,585,089; Riechmann et al., Nature 332:323 (1988), which are incorporated herein by reference in their entireties.) Antibodies can be humanized using a variety of techniques known in the art including, for example, CDR-grafting (EP 239,400; PCT publication WO 91/09967; U.S. Pat. Nos. 5,225,539; 5,530,101; and 5,585,089), veneering or resurfacing (EP 592,106; EP 519,596; Padlan, Molecular Immunology 28(4/5):489-498 (1991); Studnicka et al., Protein Engineering 7(6):805-814 (1994); Roguska. et al., PNAS 91:969-973 (1994)), and chain shuffling (U.S. Pat. No. 5,565,332).

[0306] Completely human antibodies are particularly desirable for therapeutic treatment of human patients. Human antibodies can be made by a variety of methods known in the art including phage display methods described above using antibody libraries derived from human immunoglobulin sequences. See also, U.S. Pat. Nos. 4,444,887 and 4,716,111; and PCT publications WO 98/46645, WO 98/50433, WO 98/24893, WO 98/16654, WO 96/34096, WO 96/33735, and WO 91/10741; each of which is incorporated herein by reference in its entirety.

[0307] Human antibodies can also be produced using transgenic mice which are incapable of expressing functional endogenous immunoglobulins, but which can express human immunoglobulin genes. For example, the human heavy and light chain immunoglobulin gene complexes may be introduced randomly or by homologous recombination into mouse embryonic stem cells. Alternatively, the human variable region, constant region, and diversity region may be introduced into mouse embryonic stem cells in addition to the human heavy and light chain genes. The mouse heavy and light chain immunoglobulin genes may be rendered non-functional separately or simultaneously with the introduction of human immunoglobulin loci by homologous recombination. In particular, homozygous deletion of the JH region prevents endogenous antibody production. The modified embryonic stem cells are expanded and microinjected into blastocysts to produce chimeric mice. The chimeric mice are then bred to produce homozygous offspring that express human antibodies. The transgenic mice are immunized in the normal fashion with a selected antigen, e.g., all or a portion of a polypeptide of the invention. Monoclonal antibodies directed against the antigen can be obtained from the immunized, transgenic mice using conventional hybridoma technology. The human immunoglobulin transgenes harbored by the transgenic mice rearrange during B cell differentiation, and subsequently undergo class switching and somatic mutation. Thus, using such a technique, it is possible to produce therapeutically useful IgG, IgA, IgM and IgE antibodies. For an overview of this technology for producing human antibodies, see Lonberg and Huszar, Int. Rev. Immunol. 13:65-93 (1995). For a detailed discussion of this technology for producing human antibodies and human monoclonal antibodies and protocols for producing such antibodies, see, e.g., PCT publications WO 98/24893; WO 92/01047; WO 96/34096; WO 96/33735; European Patent No. 0 598 877; U.S. Pat. Nos. 5,413,923; 5,625,126; 5,633,425; 5,569,825; 5,661,016; 5,545,806; 5,814,318; 5,885,793; 5,916,771; 5,939,598; 6,075,181; and 6,114,598, which are incorporated by reference herein in their entirety. In addition, companies such as Abgenix, Inc. (Freemont, Calif.) and Genpharm (San Jose, Calif.) can be engaged to provide human antibodies directed against a selected antigen using technology similar to that described above.

[0308] Completely human antibodies that recognize a selected epitope can be generated using a technique referred to as “guided selection.” In this approach a selected non-human monoclonal antibody, e.g., a mouse antibody, is used to guide the selection of a completely human antibody recognizing the same epitope. (Jespers et al., Bio/technology 12:899-903 (1988)).

[0309] Further, antibodies to the polypeptides of the invention can, in turn, be utilized to generate anti-idiotype antibodies that “mimic” polypeptides of the invention using techniques well known to those skilled in the art. (See, e.g., Greenspan & Bona, FASEB J. 7(5):437-444; (1989) and Nissinoff, J. Immunol. 147(8):2429-2438 (1991)). For example, antibodies which bind to and competitively inhibit polypeptide multimerization and/or binding of a polypeptide of the invention to a ligand can be used to generate anti-idiotypes that “mimic” the polypeptide multimerization and/or binding domain and, as a consequence, bind to and neutralize polypeptide and/or its ligand. Such neutralizing anti-idiotypes or Fab fragments of such anti-idiotypes can be used in therapeutic regimens to neutralize polypeptide ligand(s)/receptor(s). For example, such anti-idiotypic antibodies can be used to bind a polypeptide of the invention and/or to bind its ligand(s)/receptor(s), and thereby block its biological activity. Alternatively, antibodies which bind to and enhance polypeptide multimerization and/or binding, and/or receptor/ligand multimerization, binding and/or signaling can be used to generate anti-idiotypes that function as agonists of a polypeptide of the invention and/or its ligand/receptor. Such agonistic anti-idiotypes or Fab fragments of such anti-idiotypes can be used in therapeutic regimens as agonists of the polypeptides of the invention or its ligand(s)/receptor(s). For example, such anti-idiotypic antibodies can be used to bind a polypeptide of the invention and/or to bind its ligand(s)/receptor(s), and thereby promote or enhance its biological activity.

[0310] Intrabodies of the invention can be produced using methods known in the art, such as those disclosed and reviewed in Chen et al., Hum. Gene Ther. 5:595-601 (1994); Marasco, W. A., Gene Ther. 4:11-15 (1997); Rondon and Marasco, Annu. Rev. Microbiol. 51:257-283 (1997); Proba et al., J. Mol. Biol. 275:245-253 (1998); Cohen et al., Oncogene 17:2445-2456 (1998); Ohage and Steipe, J. Mol. Biol. 291:1119-1128 (1999); Ohage et al., J. Mol. Biol. 291:1129-1134 (1999); Wirtz and Steipe, Protein Sci. 8:2245-2250 (1999); Zhu et al., J. Immunol. Methods 231:207-222 (1999); and references cited therein.

Polynucleotides Encoding Antibodies

[0311] The invention further provides polynucleotides comprising a nucleotide sequence encoding an antibody of the invention and fragments thereof. The invention also encompasses polynucleotides that hybridize under stringent or alternatively, under lower stringency hybridization conditions, e.g., as defined supra, to polynucleotides that encode an antibody, preferably, that specifically binds to a polypeptide of the invention, preferably, an antibody that binds to a polypeptide having the amino acid sequence of SEQ ID NO:Y, to a polypeptide encoded by a portion of SEQ ID NO:X as defined in columns 8 and 9 of Table 2, and/or to a polypeptide encoded by the cDNA contained in ATCC Deposit No: Z.

[0312] The polynucleotides may be obtained, and the nucleotide sequence of the polynucleotides determined, by any method known in the art. For example, if the nucleotide sequence of the antibody is known, a polynucleotide encoding the antibody may be assembled from chemically synthesized oligonucleotides (e.g., as described in Kutmeier et al., BioTechniques 17:242 (1994)), which, briefly, involves the synthesis of overlapping oligonucleotides containing portions of the sequence encoding the antibody, annealing and ligating of those oligonucleotides, and then amplification of the ligated oligonucleotides by PCR.

[0313] Alternatively, a polynucleotide encoding an antibody may be generated from nucleic acid from a suitable source. If a clone containing a nucleic acid encoding a particular antibody is not available, but the sequence of the antibody molecule is known, a nucleic acid encoding the immunoglobulin may be chemically synthesized or obtained from a suitable source (e.g., an antibody cDNA library, or a cDNA library generated from, or nucleic acid, preferably poly A+ RNA, isolated from, any tissue or cells expressing the antibody, such as hybridoma cells selected to express an antibody of the invention) by PCR amplification using synthetic primers hybridizable to the 3′ and 5′ ends of the sequence or by cloning using an oligonucleotide probe specific for the particular gene sequence to identify, e.g., a cDNA clone from a cDNA library that encodes the antibody. Amplified nucleic acids generated by PCR may then be cloned into replicable cloning vectors using any method well known in the art.

[0314] Once the nucleotide sequence and corresponding amino acid sequence of the antibody is determined, the nucleotide sequence of the antibody may be manipulated using methods well known in the art for the manipulation of nucleotide sequences, e.g., recombinant DNA techniques, site directed mutagenesis, PCR, etc. (see, for example, the techniques described in Sambrook et al., 1990, Molecular Cloning, A Laboratory Manual, 2d Ed., Cold Spring Harbor Laboratory, Cold Spring Harbor, N.Y. and Ausubel et al., eds., 1998, Current Protocols in Molecular Biology, John Wiley & Sons, NY, which are both incorporated by reference herein in their entireties), to generate antibodies having a different amino acid sequence, for example to create amino acid substitutions, deletions, and/or insertions.

[0315] In a specific embodiment, the amino acid sequence of the heavy and/or light chain variable domains may be inspected to identify the sequences of the complementarity determining regions (CDRs) by methods that are well know in the art, e.g., by comparison to known amino acid sequences of other heavy and light chain variable regions to determine the regions of sequence hypervariability. Using routine recombinant DNA techniques, one or more of the CDRs may be inserted within framework regions, e.g., into human framework regions to humanize a non-human antibody, as described supra. The framework regions may be naturally occurring or consensus framework regions, and preferably human framework regions (see, e.g., Chothia et al., J. Mol. Biol. 278: 457-479 (1998) for a listing of human framework regions). Preferably, the polynucleotide generated by the combination of the framework regions and CDRs encodes an antibody that specifically binds a polypeptide of the invention. Preferably, as discussed supra, one or more amino acid substitutions may be made within the framework regions, and, preferably, the amino acid substitutions improve binding of the antibody to its antigen. Additionally, such methods may be used to make amino acid substitutions or deletions of one or more variable region cysteine residues participating in an intrachain disulfide bond to generate antibody molecules lacking one or more intrachain disulfide bonds. Other alterations to the polynucleotide are encompassed by the present invention and within the skill of the art.

[0316] In addition, techniques developed for the production of “chimeric antibodies” (Morrison et al., Proc. Natl. Acad. Sci. 81:851-855 (1984); Neuberger et al., Nature 312:604-608 (1984); Takeda et al., Nature 314:452-454 (1985)) by splicing genes from a mouse antibody molecule of appropriate antigen specificity together with genes from a human antibody molecule of appropriate biological activity can be used. As described supra, a chimeric antibody is a molecule in which different portions are derived from different animal species, such as those having a variable region derived from a murine mAb and a human immunoglobulin constant region, e.g., humanized antibodies.

[0317] Alternatively, techniques described for the production of single chain antibodies (U.S. Pat. No. 4,946,778; Bird, Science 242:423-42 (1988); Huston et al., Proc. Natl. Acad. Sci. USA 85:5879-5883 (1988); and Ward et al., Nature 334:544-54 (1989)) can be adapted to produce single chain antibodies. Single chain antibodies are formed by linking the heavy and light chain fragments of the Fv region via an amino acid bridge, resulting in a single chain polypeptide. Techniques for the assembly of functional Fv fragments in E. coli may also be used (Skerra et al., Science 242:1038-1041 (1988)).

Methods of Producing Antibodies

[0318] The antibodies of the invention can be produced by any method known in the art for the synthesis of antibodies, in particular, by chemical synthesis or preferably, by recombinant expression techniques. Methods of producing antibodies include, but are not limited to, hybridoma technology, EBV transformation, and other methods discussed herein as well as through the use recombinant DNA technology, as discussed below.

[0319] Recombinant expression of an antibody of the invention, or fragment, derivative or analog thereof, (e.g., a heavy or light chain of an antibody of the invention or a single chain antibody of the invention), requires construction of an expression vector containing a polynucleotide that encodes the antibody. Once a polynucleotide encoding an antibody molecule or a heavy or light chain of an antibody, or portion thereof (preferably containing the heavy or light chain variable domain), of the invention has been obtained, the vector for the production of the antibody molecule may be produced by recombinant DNA technology using techniques well known in the art. Thus, methods for preparing a protein by expressing a polynucleotide containing an antibody encoding nucleotide sequence are described herein. Methods that are well known to those skilled in the art can be used to construct expression vectors containing antibody coding sequences and appropriate transcriptional and translational control signals. These methods include, for example, in vitro recombinant DNA techniques, synthetic techniques, and in vivo genetic recombination. The invention, thus, provides replicable vectors comprising a nucleotide sequence encoding an antibody molecule of the invention, or a heavy or light chain thereof, or a heavy or light chain variable domain, operably linked to a promoter. Such vectors may include the nucleotide sequence encoding the constant region of the antibody molecule (see, e.g., PCT Publication WO 86/05807; PCT Publication WO 89/01036; and U.S. Pat. No. 5,122,464) and the variable domain of the antibody may be cloned into such a vector for expression of the entire heavy or light chain.

[0320] The expression vector is transferred to a host cell by conventional techniques and the transfected cells are then cultured by conventional techniques to produce an antibody of the invention. Thus, the invention includes host cells containing a polynucleotide encoding an antibody of the invention, or a heavy or light chain thereof, or a single chain antibody of the invention, operably linked to a heterologous promoter. In preferred embodiments for the expression of double-chained antibodies, vectors encoding both the heavy and light chains may be co-expressed in the host cell for expression of the entire immunoglobulin molecule, as detailed below.

[0321] A variety of host-expression vector systems may be utilized to express the antibody molecules of the invention. Such host-expression systems represent vehicles by which the coding sequences of interest may be produced and subsequently purified, but also represent cells which may, when transformed or transfected with the appropriate nucleotide coding sequences, express an antibody molecule of the invention in situ. These include but are not limited to microorganisms such as bacteria (e.g., E. coli, B. subtilis) transformed with recombinant bacteriophage DNA, plasmid DNA or cosmid DNA expression vectors containing antibody coding sequences; yeast (e.g., Saccharomyces, Pichia) transformed with recombinant yeast expression vectors containing antibody coding sequences; insect cell systems infected with recombinant virus expression vectors (e.g., baculovirus) containing antibody coding sequences; plant cell systems infected with recombinant virus expression vectors (e.g., cauliflower mosaic virus, CaMV; tobacco mosaic virus, TMV) or transformed with recombinant plasmid expression vectors (e.g., Ti plasmid) containing antibody coding sequences; or mammalian cell systems (e.g., COS, CHO, BHK, 293, 3T3 cells) harboring recombinant expression constructs containing promoters derived from the genome of mammalian cells (e.g., metallothionein promoter) or from mammalian viruses (e.g., the adenovirus late promoter; the vaccinia virus 7.5K promoter). Preferably, bacterial cells such as Escherichia coli, and more preferably, eukaryotic cells, especially for the expression of whole recombinant antibody molecule, are used for the expression of a recombinant antibody molecule. For example, mammalian cells such as Chinese hamster ovary cells (CHO), in conjunction with a vector such as the major intermediate early gene promoter element from human cytomegalovirus is an effective expression system for antibodies (Foecking et al., Gene 45:101 (1986); Cockett et al., Bio/Technology 8:2 (1990)).

[0322] In bacterial systems, a number of expression vectors may be advantageously selected depending upon the use intended for the antibody molecule being expressed. For example, when a large quantity of such a protein is to be produced, for the generation of pharmaceutical compositions of an antibody molecule, vectors which direct the expression of high levels of fusion protein products that are readily purified may be desirable. Such vectors include, but are not limited, to the E. coli expression vector pUR278 (Ruther et al., EMBO J. 2:1791 (1983)), in which the antibody coding sequence may be ligated individually into the vector in frame with the lac Z coding region so that a fusion protein is produced; pIN vectors (Inouye & Inouye, Nucleic Acids Res. 13:3101-3109 (1985); Van Heeke & Schuster, J. Biol. Chem. 24:5503-5509 (1989)); and the like. pGEX vectors may also be used to express foreign polypeptides as fusion proteins with glutathione S-transferase (GST). In general, such fusion proteins are soluble and can easily be purified from lysed cells by adsorption and binding to matrix glutathione-agarose beads followed by elution in the presence of free glutathione. The pGEX vectors are designed to include thrombin or factor Xa protease cleavage sites so that the cloned target gene product can be released from the GST moiety.

[0323] In an insect system, Autographa californica nuclear polyhedrosis virus (AcNPV) is used as a vector to express foreign genes. The virus grows in Spodoptera frugiperda cells. The antibody coding sequence may be cloned individually into non-essential regions (for example the polyhedrin gene) of the virus and placed under control of an AcNPV promoter (for example the polyhedrin promoter).

[0324] In mammalian host cells, a number of viral-based expression systems may be utilized. In cases where an adenovirus is used as an expression vector, the antibody coding sequence of interest may be ligated to an adenovirus transcription/translation control complex, e.g., the late promoter and tripartite leader sequence. This chimeric gene may then be inserted in the adenovirus genome by in vitro or in vivo recombination. Insertion in a non-essential region of the viral genome (e.g., region E1 or E3) will result in a recombinant virus that is viable and capable of expressing the antibody molecule in infected hosts. (e.g., see Logan & Shenk, Proc. Natl. Acad. Sci. USA 81:355-359 (1984)). Specific initiation signals may also be required for efficient translation of inserted antibody coding sequences. These signals include the ATG initiation codon and adjacent sequences. Furthermore, the initiation codon must be in phase with the reading frame of the desired coding sequence to ensure translation of the entire insert. These exogenous translational control signals and initiation codons can be of a variety of origins, both natural and synthetic. The efficiency of expression may be enhanced by the inclusion of appropriate transcription enhancer elements, transcription terminators, etc. (see Bittner et al., Methods in Enzymol. 153:51-544 (1987)).

[0325] In addition, a host cell strain may be chosen which modulates the expression of the inserted sequences, or modifies and processes the gene product in the specific fashion desired. Such modifications (e.g., glycosylation) and processing (e.g., cleavage) of protein products may be important for the function of the protein. Different host cells have characteristic and specific mechanisms for the post-translational processing and modification of proteins and gene products. Appropriate cell lines or host systems can be chosen to ensure the correct modification and processing of the foreign protein expressed. To this end, eukaryotic host cells which possess the cellular machinery for proper processing of the primary transcript, glycosylation, and phosphorylation of the gene product may be used. Such mammalian host cells include but are not limited to CHO, VERY, BHK, Hela, COS, MDCK, 293, 3T3, WI38, and in particular, breast cancer cell lines such as, for example, BT483, Hs578T, HTB2, BT20 and T47D, and normal mammary gland cell line such as, for example, CRL7030 and Hs578Bst.

[0326] For long-term, high-yield production of recombinant proteins, stable expression is preferred. For example, cell lines which stably express the antibody molecule may be engineered. Rather than using expression vectors which contain viral origins of replication, host cells can be transformed with DNA controlled by appropriate expression control elements (e.g., promoter, enhancer, sequences, transcription terminators, polyadenylation sites, etc.), and a selectable marker. Following the introduction of the foreign DNA, engineered cells may be allowed to grow for 1-2 days in an enriched media, and then are switched to a selective media. The selectable marker in the recombinant plasmid confers resistance to the selection and allows cells to stably integrate the plasmid into their chromosomes and grow to form foci which in turn can be cloned and expanded into cell lines. This method may advantageously be used to engineer cell lines which express the antibody molecule. Such engineered cell lines may be particularly useful in screening and evaluation of compounds that interact directly or indirectly with the antibody molecule.

[0327] A number of selection systems may be used, including but not limited to the herpes simplex virus thymidine kinase (Wigler et al., Cell 11:223 (1977)), hypoxanthine-guanine phosphoribosyltransferase (Szybalska & Szybalski, Proc. Natl. Acad. Sci. USA 48:202 (1992)), and adenine phosphoribosyltransferase (Lowy et al., Cell 22:817 (1980)) genes can be employed in tk−, hgprt− or aprt− cells, respectively. Also, antimetabolite resistance can be used as the basis of selection for the following genes: dhfr, which confers resistance to methotrexate (Wigler et al., Natl. Acad. Sci. USA 77:357 (1980); O'Hare et al., Proc. Natl. Acad. Sci. USA 78:1527 (1981)); gpt, which confers resistance to mycophenolic acid (Mulligan & Berg, Proc. Natl. Acad. Sci. USA 78:2072 (1981)); neo, which confers resistance to the aminoglycoside G-418 Clinical Pharmacy 12:488-505; Wu and Wu, Biotherapy 3:87-95 (1991); Tolstoshev, Ann. Rev. Pharmacol. Toxicol. 32:573-596 (1993); Mulligan, Science 260:926-932 (1993); and Morgan and Anderson, Ann. Rev. Biochem. 62:191-217 (1993); May, 1993, TIB TECH 11(5):155-215 (1993)); and hygro, which confers resistance to hygromycin (Santerre et al., Gene 30:147 (1984)). Methods commonly known in the art of recombinant DNA technology may be routinely applied to select the desired recombinant clone, and such methods are described, for example, in Ausubel et al. (eds.), Current Protocols in Molecular Biology, John Wiley & Sons, NY (1993); Kriegler, Gene Transfer and Expression, A Laboratory Manual, Stockton Press, NY (1990); and in Chapters 12 and 13, Dracopoli et al. (eds), Current Protocols in Human Genetics, John Wiley & Sons, NY (1994); Colberre-Garapin et al., J. Mol. Biol. 150:1 (1981), which are incorporated by reference herein in their entireties.

[0328] The expression levels of an antibody molecule can be increased by vector amplification (for a review, see Bebbington and Hentschel, The use of vectors based on gene amplification for the expression of cloned genes in mammalian cells in DNA cloning, Vol. 3. (Academic Press, New York, 1987)). When a marker in the vector system expressing antibody is amplifiable, increase in the level of inhibitor present in culture of host cell will increase the number of copies of the marker gene. Since the amplified region is associated with the antibody gene, production of the antibody will also increase (Crouse et al., Mol. Cell. Biol. 3:257 (1983)).

[0329] Vectors which use glutamine synthase (GS) or DHFR as the selectable markers can be amplified in the presence of the drugs methionine sulphoximine or methotrexate, respectively. An advantage of glutamine synthase based vectors are the availabilty of cell lines (e.g., the murine myeloma cell line, NS0) which are glutamine synthase negative. Glutamine synthase expression systems can also function in glutamine synthase expressing cells (e.g. Chinese Hamster Ovary (CHO) cells) by providing additional inhibitor to prevent the functioning of the endogenous gene. A glutamine synthase expression system and components thereof are detailed in PCT publications: WO87/04462; WO86/05807; WO89/01036; WO89/10404; and WO91/06657 which are incorporated in their entireties by reference herein. Additionally, glutamine synthase expression vectors that may be used according to the present invention are commercially available from suplliers, including, for example Lonza Biologics, Inc. (Portsmouth, N.H.). Expression and production of monoclonal antibodies using a GS expression system in murine myeloma cells is described in Bebbington et al., Bio/technology 10:169 (1992) and in Biblia and Robinson Biotechnol. Prog. 11:1 (1995) which are incorporated in their entirities by reference herein.

[0330] The host cell may be co-transfected with two expression vectors of the invention, the first vector encoding a heavy chain derived polypeptide and the second vector encoding a light chain derived polypeptide. The two vectors may contain identical selectable markers which enable equal expression of heavy and light chain polypeptides. Alternatively, a single vector may be used which encodes, and is capable of expressing, both heavy and light chain polypeptides. In such situations, the light chain should be placed before the heavy chain to avoid an excess of toxic free heavy chain (Proudfoot, Nature 322:52 (1986); Kohler, Proc. Natl. Acad. Sci. USA 77:2197 (1980)). The coding sequences for the heavy and light chains may comprise cDNA or genomic DNA.

[0331] Once an antibody molecule of the invention has been produced by an animal, chemically synthesized, or recombinantly expressed, it may be purified by any method known in the art for purification of an immunoglobulin molecule, for example, by chromatography (e.g., ion exchange, affinity, particularly by affinity for the specific antigen after Protein A, and sizing column chromatography), centrifugation, differential solubility, or by any other standard technique for the purification of proteins. In addition, the antibodies of the present invention or fragments thereof can be fused to heterologous polypeptide sequences described herein or otherwise known in the art, to facilitate purification.

[0332] The present invention encompasses antibodies recombinantly fused or chemically conjugated (including both covalently and non-covalently conjugations) to a polypeptide (or portion thereof, preferably at least 10, 20, 30, 40, 50, 60, 70, 80, 90 or 100 amino acids of the polypeptide) of the present invention to generate fusion proteins. The fusion does not necessarily need to be direct, but may occur through linker sequences. The antibodies may be specific for antigens other than polypeptides (or portion thereof, preferably at least 10, 20, 30, 40, 50, 60, 70, 80, 90 or 100 amino acids of the polypeptide) of the present invention. For example, antibodies may be used to target the polypeptides of the present invention to particular cell types, either in vitro or in vivo, by fusing or conjugating the polypeptides of the present invention to antibodies specific for particular cell surface receptors. Antibodies fused or conjugated to the polypeptides of the present invention may also be used in in vitro immunoassays and purification methods using methods known in the art. See e.g., Harbor et al., supra, and PCT publication WO 93/21232; EP 439,095; Naramura et al., Immunol. Lett. 39:91-99 (1994); U.S. Pat. No. 5,474,981; Gillies et al., PNAS 89:1428-1432 (1992); Fell et al., J. Immunol. 146:2446-2452 (1991), which are incorporated by reference in their entireties.

[0333] The present invention further includes compositions comprising the polypeptides of the present invention fused or conjugated to antibody domains other than the variable regions. For example, the polypeptides of the present invention may be fused or conjugated to an antibody Fc region, or portion thereof. The antibody portion fused to a polypeptide of the present invention may comprise the constant region, hinge region, CH1 domain, CH2 domain, and CH3 domain or any combination of whole domains or portions thereof. The polypeptides may also be fused or conjugated to the above antibody portions to form multimers. For example, Fc portions fused to the polypeptides of the present invention can form dimers through disulfide bonding between the Fc portions. Higher multimeric forms can be made by fusing the polypeptides to portions of IgA and IgM. Methods for fusing or conjugating the polypeptides of the present invention to antibody portions are known in the art. See, e.g., U.S. Pat. Nos. 5,336,603; 5,622,929; 5,359,046; 5,349,053; 5,447,851; 5,112,946; EP 307,434; EP 367,166; PCT publications WO 96/04388; WO 91/06570; Ashkenazi et al., Proc. Natl. Acad. Sci. USA 88:10535-10539 (1991); Zheng et al., J. Immunol. 154:5590-5600 (1995); and Vil et al., Proc. Natl. Acad. Sci. USA 89:11337-11341 (1992) (said references incorporated by reference in their entireties).

[0334] As discussed, supra, the polypeptides corresponding to a polypeptide, polypeptide fragment, or a variant of SEQ ID NO:Y may be fused or conjugated to the above antibody portions to increase the in vivo half life of the polypeptides or for use in immunoassays using methods known in the art. Further, the polypeptides corresponding to SEQ ID NO:Y may be fused or conjugated to the above antibody portions to facilitate purification. One reported example describes chimeric proteins consisting of the first two domains of the human CD4-polypeptide and various domains of the constant regions of the heavy or light chains of mammalian immunoglobulins. See EP 394,827; and Traunecker et al., Nature 331:84-86 (1988). The polypeptides of the present invention fused or conjugated to an antibody having disulfide-linked dimeric structures (due to the IgG) may also be more efficient in binding and neutralizing other molecules, than the monomeric secreted protein or protein fragment alone. See, for example, Fountoulakis et al., J. Biochem. 270:3958-3964 (1995). In many cases, the Fc part in a fusion protein is beneficial in therapy and diagnosis, and thus can result in, for example, improved pharmacokinetic properties. See, for example, EP A 232,262. Alternatively, deleting the Fc part after the fusion protein has been expressed, detected, and purified, would be desired. For example, the Fc portion may hinder therapy and diagnosis if the fusion protein is used as an antigen for immunizations. In drug discovery, for example, human proteins, such as hIL-5, have been fused with Fc portions for the purpose of high-throughput screening assays to identify antagonists of hIL-5. (See, Bennett et al., J. Molecular Recognition 8:52-58 (1995); Johanson et al., J. Biol. Chem. 270:9459-9471 (1995)).

[0335] Moreover, the antibodies or fragments thereof of the present invention can be fused to marker sequences, such as a peptide to facilitate purification. In preferred embodiments, the marker amino acid sequence is a hexa-histidine peptide, such as the tag provided in a pQE vector (QIAGEN, Inc., 9259 Eton Avenue, Chatsworth, Calif., 91311), among others, many of which are commercially available. As described in Gentz et al., Proc. Natl. Acad. Sci. USA 86:821-824 (1989), for instance, hexa-histidine provides for convenient purification of the fusion protein. Other peptide tags useful for purification include, but are not limited to, the “HA” tag, which corresponds to an epitope derived from the influenza hemagglutinin protein (Wilson et al., Cell 37:767 (1984)) and the “flag” tag.

[0336] The present invention further encompasses antibodies or fragments thereof conjugated to a diagnostic or therapeutic agent. The antibodies can be used diagnostically to, for example, monitor the development or progression of a tumor as part of a clinical testing procedure to, e.g., determine the efficacy of a given treatment regimen. Detection can be facilitated by coupling the antibody to a detectable substance. Examples of detectable substances include various enzymes, prosthetic groups, fluorescent materials, luminescent materials, bioluminescent materials, radioactive materials, positron emitting metals using various positron emission tomographies, and nonradioactive paramagnetic metal ions. The detectable substance may be coupled or conjugated either directly to the antibody (or fragment thereof) or indirectly, through an intermediate (such as, for example, a linker known in the art) using techniques known in the art. See, for example, U.S. Pat. No. 4,741,900 for metal ions that can be conjugated to antibodies for use as diagnostics according to the present invention. Examples of suitable enzymes include horseradish peroxidase, alkaline phosphatase, beta-galactosidase, or acetylcholinesterase; examples of suitable prosthetic group complexes include streptavidin/biotin and avidin/biotin; examples of suitable fluorescent materials include umbelliferone, fluorescein, fluorescein isothiocyanate, rhodamine, dichlorotriazinylamine fluorescein, dansyl chloride or phycoerythrin; an example of a luminescent material includes luminol; examples of bioluminescent materials include luciferase, luciferin, and aequorin; and examples of suitable radioactive material include 125I, 131I, 11lIn or 99Tc.

[0337] Further, an antibody or fragment thereof may be conjugated to a therapeutic moiety such as a cytotoxin, e.g., a cytostatic or cytocidal agent, a therapeutic agent or a radioactive metal ion, e.g., alpha-emitters such as, for example, 213Bi. A cytotoxin or cytotoxic agent includes any agent that is detrimental to cells. Examples include paclitaxol, cytochalasin B, gramicidin D, ethidium bromide, emetine, mitomycin, etoposide, tenoposide, vincristine, vinblastine, colchicin, doxorubicin, daunorubicin, dihydroxy anthracin dione, mitoxantrone, mithramycin, actinomycin D, 1-dehydrotestosterone, glucocorticoids, procaine, tetracaine, lidocaine, propranolol, and puromycin and analogs or homologs thereof. Therapeutic agents include, but are not limited to, antimetabolites (e.g., methotrexate, 6-mercaptopurine, 6-thioguanine, cytarabine, 5-fluorouracil decarbazine), alkylating agents (e.g., mechlorethamine, thioepa chlorambucil, melphalan, carmustine (BSNU) and lomustine (CCNU), cyclothosphamide, busulfan, dibromomannitol, streptozotocin, mitomycin C, and cis-dichlorodiamine platinum (II) (DDP) cisplatin), anthracyclines (e.g., daunorubicin (formerly daunomycin) and doxorubicin), antibiotics (e.g., dactinomycin (formerly actinomycin), bleomycin, mithramycin, and anthramycin (AMC)), and anti-mitotic agents (e.g., vincristine and vinblastine).

[0338] The conjugates of the invention can be used for modifying a given biological response, the therapeutic agent or drug moiety is not to be construed as limited to classical chemical therapeutic agents. For example, the drug moiety may be a protein or polypeptide possessing a desired biological activity. Such proteins may include, for example, a toxin such as abrin, ricin A, pseudomonas exotoxin, or diphtheria toxin; a protein such as tumor necrosis factor, a-interferon, β-interferon, nerve growth factor, platelet derived growth factor, tissue plasminogen activator, an apoptotic agent, e.g., TNF-alpha, TNF-beta, AIM I (See, International Publication No. WO 97/33899), AIM II (See, International Publication No. WO 97/34911), Fas Ligand (Takahashi et al, Int. Immunol., 6:1567-1574 (1994)), VEGI (See, International Publication No. WO 99/23105), a thrombotic agent or an anti-angiogenic agent, e.g., angiostatin or endostatin; or, biological response modifiers such as, for example, lymphokines, interleukin-1 (“IL-1”), interleukin-2 (“IL-2”), interleukin-6 (“IL-6”), granulocyte macrophage colony stimulating factor (“GM-CSF”), granulocyte colony stimulating factor (“G-CSF”), or other growth factors.

[0339] Antibodies may also be attached to solid supports, which are particularly useful for immunoassays or purification of the target antigen. Such solid supports include, but are not limited to, glass, cellulose, polyacrylamide, nylon, polystyrene, polyvinyl chloride or polypropylene.

[0340] Techniques for conjugating such therapeutic moiety to antibodies are well known. See, for example, Arnon et al., “Monoclonal Antibodies For Immunotargeting Of Drugs In Cancer Therapy”, in Monoclonal Antibodies And Cancer Therapy, Reisfeld et al. (eds.), pp. 243-56 (Alan R. Liss, Inc. 1985); Hellstrom et al., “Antibodies For Drug Delivery”, in Controlled Drug Delivery (2nd Ed.), Robinson et al. (eds.), pp. 623-53 (Marcel Dekker, Inc. 1987); Thorpe, “Antibody Carriers Of Cytotoxic Agents In Cancer Therapy: A Review”, in Monoclonal Antibodies '84: Biological And Clinical Applications, Pinchera et al. (eds.), pp. 475-506 (1985); “Analysis, Results, And Future Prospective Of The Therapeutic Use Of Radiolabeled Antibody In Cancer Therapy”, in Monoclonal Antibodies For Cancer Detection And Therapy, Baldwin et al. (eds.), pp. 303-16 (Academic Press 1985), and Thorpe et al., “The Preparation And Cytotoxic Properties Of Antibody-Toxin Conjugates”, Immunol. Rev. 62:119-58 (1982).

[0341] Alternatively, an antibody can be conjugated to a second antibody to form an antibody heteroconjugate as described by Segal in U.S. Pat. No. 4,676,980, which is incorporated herein by reference in its entirety.

[0342] An antibody, with or without a therapeutic moiety conjugated to it, administered alone or in combination with cytotoxic factor(s) and/or cytokine(s) can be used as a therapeutic.

Immunophenotyping

[0343] The antibodies of the invention may be utilized for immunophenotyping of cell lines and biological samples. Translation products of the gene of the present invention may be useful as cell-specific markers, or more specifically as cellular markers that are differentially expressed at various stages of differentiation and/or maturation of particular cell types. Monoclonal antibodies directed against a specific epitope, or combination of epitopes, will allow for the screening of cellular populations expressing the marker. Various techniques can be utilized using monoclonal antibodies to screen for cellular populations expressing the marker(s), and include magnetic separation using antibody-coated magnetic beads, “panning” with antibody attached to a solid matrix (i.e., plate), and flow cytometry (See, e.g., U.S. Pat. No. 5,985,660; and Morrison et al., Cell, 96:737-49 (1999)).

[0344] These techniques allow for the screening of particular populations of cells, such as might be found with hematological malignancies (i.e. minimal residual disease (MRD) in acute leukemic patients) and “non-self” cells in transplantations to prevent Graft-versus-Host Disease (GVHD). Alternatively, these techniques allow for the screening of hematopoietic stem and progenitor cells capable of undergoing proliferation and/or differentiation, as might be found in human umbilical cord blood.

Assays for Antibody Binding

[0345] The antibodies of the invention may be assayed for immunospecific binding by any method known in the art. The immunoassays which can be used include but are not limited to competitive and non-competitive assay systems using techniques such as western blots, radioimmunoassays, ELISA (enzyme linked immunosorbent assay), “sandwich” immunoassays, immunoprecipitation assays, precipitin reactions, gel diffusion precipitin reactions, immunodiffusion assays, agglutination assays, complement-fixation assays, immunoradiometric assays, fluorescent immunoassays, and protein A immunoassays, to name but a few. Such assays are routine and well known in the art (see, e.g., Ausubel et al, eds, 1994, Current Protocols in Molecular Biology, Vol. 1, John Wiley & Sons, Inc., New York, which is incorporated by reference herein in its entirety). Exemplary immunoassays are described briefly below (but are not intended by way of limitation).

[0346] Immunoprecipitation protocols generally comprise lysing a population of cells in a lysis buffer such as RIPA buffer (1% NP-40 or Triton X-100, 1% sodium deoxycholate, 0.1% SDS, 0.15 M NaCl, 0.01 M sodium phosphate at pH 7.2, 1% Trasylol) supplemented with protein phosphatase and/or protease inhibitors (e.g., EDTA, PMSF, aprotinin, sodium vanadate), adding the antibody of interest to the cell lysate, incubating for a period of time (e.g., 1-4 hours) at 4° C., adding protein A and/or protein G sepharose beads to the cell lysate, incubating for about an hour or more at 4° C., washing the beads in lysis buffer and resuspending the beads in SDS/sample buffer. The ability of the antibody of interest to immunoprecipitate a particular antigen can be assessed by, e.g., western blot analysis. One of skill in the art would be knowledgeable as to the parameters that can be modified to increase the binding of the antibody to an antigen and decrease the background (e.g., pre-clearing the cell lysate with sepharose beads). For further discussion regarding immunoprecipitation protocols see, e.g., Ausubel et al., eds., (1994), Current Protocols in Molecular Biology, Vol. 1, John Wiley & Sons, Inc., New York, section 10.16.1.

[0347] Western blot analysis generally comprises preparing protein samples, electrophoresis of the protein samples in a polyacrylamide gel (e.g., 8%-20% SDS-PAGE depending on the molecular weight of the antigen), transferring the protein sample from the polyacrylamide gel to a membrane such as nitrocellulose, PVDF or nylon, blocking the membrane in blocking solution (e.g., PBS with 3% BSA or non-fat milk), washing the membrane in washing buffer (e.g., PBS-Tween 20), blocking the membrane with primary antibody (the antibody of interest) diluted in blocking buffer, washing the membrane in washing buffer, blocking the membrane with a secondary antibody (which recognizes the primary antibody, e.g., an anti-human antibody) conjugated to an enzymatic substrate (e.g., horseradish peroxidase or alkaline phosphatase) or radioactive molecule (e.g., 32P or 125I) diluted in blocking buffer, washing the membrane in wash buffer, and detecting the presence of the antigen. One of skill in the art would be knowledgeable as to the parameters that can be modified to increase the signal detected and to reduce the background noise. For further discussion regarding western blot protocols see, e.g., Ausubel et al, eds, (1994), Current Protocols in Molecular Biology, Vol. 1, John Wiley & Sons, Inc., New York, section 10.8.1.

[0348] ELISAs comprise preparing antigen, coating the well of a 96 well microtiter plate with the antigen, adding the antibody of interest conjugated to a detectable compound such as an enzymatic substrate (e.g., horseradish peroxidase or alkaline phosphatase) to the well and incubating for a period of time, and detecting the presence of the antigen. In ELISAs the antibody of interest does not have to be conjugated to a detectable compound; instead, a second antibody (which recognizes the antibody of interest) conjugated to a detectable compound may be added to the well. Further, instead of coating the well with the antigen, the antibody may be coated to the well. In this case, a second antibody conjugated to a detectable compound may be added following the addition of the antigen of interest to the coated well. One of skill in the art would be knowledgeable as to the parameters that can be modified to increase the signal detected as well as other variations of ELISAs known in the art. For further discussion regarding ELISAs see, e.g., Ausubel et al, eds, (1994), Current Protocols in Molecular Biology, Vol. 1, John Wiley & Sons, Inc., New York, section 11.2.1.

[0349] The binding affinity of an antibody to an antigen and the off-rate of an antibody-antigen interaction can be determined by competitive binding assays. One example of a competitive binding assay is a radioimmunoassay comprising the incubation of labeled antigen (e.g., 3H or 125I) with the antibody of interest in the presence of increasing amounts of unlabeled antigen, and the detection of the antibody bound to the labeled antigen. The affinity of the antibody of interest for a particular antigen and the binding off-rates can be determined from the data by scatchard plot analysis. Competition with a second antibody can also be determined using radioimmunoassays. In this case, the antigen is incubated with antibody of interest conjugated to a labeled compound (e.g., 3H or 125I) in the presence of increasing amounts of an unlabeled second antibody.

[0350] Antibodies of the invention may be characterized using immunocytochemisty methods on cells (e.g., mammalian cells, such as CHO cells) transfected with a vector enabling the expression of an antigen or with vector alone using techniques commonly known in the art. Antibodies that bind antigen transfected cells, but not vector-only transfected cells, are antigen specific.

Therapeutic Uses

[0351] Table 1D also provides information regarding biological activities and preferred therapeutic uses (i.e. see, “Preferred Indications” column) for polynucleotides and polypeptides of the invention (including antibodies, agonists, and/or antagonists thereof). Table 1D also provides information regarding assays which may be used to test polynucleotides and polypeptides of the invention (including antibodies, agonists, and/or antagonists thereof) for the corresponding biological activities. The first column (“Gene No.”) provides the gene number in the application for each clone identifier. The second column (“cDNA ATCC Deposit No: Z”) provides the unique clone identifier for each clone as previously described and indicated in Table 1A, Table 1B, and Table 1C. The third column (“AA SEQ ID NO:Y”) indicates the Sequence Listing SEQ ID Number for polypeptide sequences encoded by the corresponding cDNA clones (also as indicated in Table 1A, Table 1B, and Table 2). The fourth column (“Biological Activity”) indicates a biological activity corresponding to the indicated polypeptides (or polynucleotides encoding said polypeptides). The fifth column (“Exemplary Activity Assay”) further describes the corresponding biological activity and also provides information pertaining to the various types of assays that may be performed to test, demonstrate, or quantify the corresponding biological activity.

[0352] The present invention is further directed to antibody-based therapies which involve administering antibodies of the invention to an animal, preferably a mammal, and most preferably a human, patient for treating one or more of the disclosed diseases, disorders, or conditions. Therapeutic compounds of the invention include, but are not limited to, antibodies of the invention (including fragments, analogs and derivatives thereof as described herein) and nucleic acids encoding antibodies of the invention (including fragments, analogs and derivatives thereof and anti-idiotypic antibodies as described herein). The antibodies of the invention can be used to detect, prevent, diagnose, prognosticate, treat, and/or ameliorate diseases, disorders or conditions associated with aberrant expression and/or activity of a polypeptide of the invention, including, but not limited to, allergic and/or asthmatic diseases and disorders. The treatment and/or prevention of allergic and/or asthmatic diseases and disorders associated with aberrant expression and/or activity of a polypeptide of the invention includes, but is not limited to, alleviating symptoms associated with allergic and/or asthmatic diseases and disorders. Antibodies of the invention may be provided in pharmaceutically acceptable compositions as known in the art or as described herein.

[0353] In a specific and preferred embodiment, the present invention is directed to antibody-based therapies which involve administering antibodies of the invention to an animal, preferably a mammal, and most preferably a human, patient for treating allergic and/or asthmatic diseases and disorders. Therapeutic compounds of the invention include, but are not limited to, antibodies of the invention (e.g., antibodies directed to the full length protein expressed on the cell surface of a mammalian cell; antibodies directed to an epitope of a polypeptide of the invention (such as, for example, a predicted linear epitope shown in Table 1B; or a conformational epitope, including fragments, analogs and derivatives thereof as described herein) and nucleic acids encoding antibodies of the invention (including fragments, analogs and derivatives thereof and anti-idiotypic antibodies as described herein). The antibodies of the invention can be used to detect, diagnose, prevent, treat, prognosticate, and/or ameliorate allergic and/or asthmatic diseases, disorders or conditions associated with aberrant expression and/or activity of a polypeptide of the invention. The treatment and/or prevention of allergic and/or asthmatic diseases, disorders or conditions associated with aberrant expression and/or activity of a polypeptide of the invention includes, but is not limited to, alleviating symptoms associated with those diseases, disorders or conditions. Antibodies of the invention may be provided in pharmaceutically acceptable compositions as known in the art or as described herein.

[0354] A summary of the ways in which the antibodies of the present invention may be used therapeutically includes binding polynucleotides or polypeptides of the present invention locally or systemically in the body or by direct cytotoxicity of the antibody, e.g. as mediated by complement (CDC) or by effector cells (ADCC). Some of these approaches are described in more detail below. Armed with the teachings provided herein, one of ordinary skill in the art will know how to use the antibodies of the present invention for diagnostic, monitoring or therapeutic purposes without undue experimentation.

[0355] The antibodies of this invention may be advantageously utilized in combination with other monoclonal or chimeric antibodies, or with lymphokines or hematopoietic growth factors (such as, e.g., IL-2, IL-3 and IL-7), for example, which serve to increase the number or activity of effector cells that interact with the antibodies.

[0356] The antibodies of the invention may be administered alone or in combination with other types of treatments (e.g., radiation therapy, chemotherapy, hormonal therapy, immunotherapy and anti-tumor agents). Generally, administration of products of a species origin or species reactivity (in the case of antibodies) that is the same species as that of the patient is preferred. Thus, in a preferred embodiment, human antibodies, fragments derivatives, analogs, or nucleic acids, are administered to a human patient for therapy or prophylaxis.

[0357] It is preferred to use high affinity and/or potent in vivo inhibiting and/or neutralizing antibodies against polypeptides or polynucleotides of the present invention, fragments or regions thereof, for both immunoassays directed to and therapy of allergic and/or asthmatic diseases or disorders related to polynucleotides or polypeptides, including fragments thereof, of the present invention. Such antibodies, fragments, or regions, will preferably have an affinity for polynucleotides or polypeptides of the invention, including fragments thereof. Preferred binding affinities include those with a dissociation constant or Kd less than 5×10⁻² M, 10⁻² M, 5×10⁻³ M, 10⁻³ M, 5×10⁻⁴ M, 10⁻⁴ M, 5×10⁻⁵ M, 10⁻⁵ M, 5×10⁻⁶ M, 10⁻⁶ M, 5×10⁻⁷ M, 10⁻⁷ M, 5×10⁻⁸ M, 10⁻⁸ M, 5×10⁻⁹ M, 10⁻⁹ M, 5×10⁻¹⁰ M, 10⁻¹⁰ M, 5×10⁻¹¹ M, 10⁻¹¹ M, 5×10⁻¹² M, 10⁻¹² M, 5×10⁻¹³ M, 10⁻¹³ M, 5×10⁻¹⁴ M, 10⁻¹⁴ M, 5×10⁻¹⁵ M, and 10⁻¹⁵ M.

Gene Therapy

[0358] In a specific embodiment, nucleic acids comprising sequences encoding antibodies or functional derivatives thereof, are administered to treat, inhibit or prevent an allergic and/or asthmatic disease or disorder associated with aberrant expression and/or activity of a polypeptide of the invention, by way of gene therapy. Gene therapy refers to therapy performed by the administration to a subject of an expressed or expressible nucleic acid. In this embodiment of the invention, the nucleic acids produce their encoded protein that mediates a therapeutic effect.

[0359] Any of the methods for gene therapy available in the art can be used according to the present invention. Exemplary methods are described below.

[0360] For general reviews of the methods of gene therapy, see Goldspiel et al., Clinical Pharmacy 12:488-505 (1993); Wu and Wu, Biotherapy 3:87-95 (1991); Tolstoshev, Ann. Rev. Pharmacol. Toxicol. 32:573-596 (1993); Mulligan, Science 260:926-932 (1993); and Morgan and Anderson, Ann. Rev. Biochem. 62:191-217 (1993); May, TIBTECH 11(5):155-215 (1993). Methods commonly known in the art of recombinant DNA technology which can be used are described in Ausubel et al. (eds.), Current Protocols in Molecular Biology, John Wiley & Sons, NY (1993); and Kriegler, Gene Transfer and Expression, A Laboratory Manual, Stockton Press, NY (1990).

[0361] In a preferred embodiment, the compound comprises nucleic acid sequences encoding an antibody, said nucleic acid sequences being part of expression vectors that express the antibody or fragments or chimeric proteins or heavy or light chains thereof in a suitable host. In particular, such nucleic acid sequences have promoters operably linked to the antibody coding region, said promoter being inducible or constitutive, and, optionally, tissue-specific. In another particular embodiment, nucleic acid molecules are used in which the antibody coding sequences and any other desired sequences are flanked by regions that promote homologous recombination at a desired site in the genome, thus providing for intrachromosomal expression of the antibody encoding nucleic acids (Koller and Smithies, Proc. Natl. Acad. Sci. USA 86:8932-8935 (1989); Zijlstra et al., Nature 342:435-438 (1989). In specific embodiments, the expressed antibody molecule is a single chain antibody; alternatively, the nucleic acid sequences include sequences encoding both the heavy and light chains, or fragments thereof, of the antibody.

[0362] Delivery of the nucleic acids into a patient may be either direct, in which case the patient is directly exposed to the nucleic acid or nucleic acid-carrying vectors, or indirect, in which case, cells are first transformed with the nucleic acids in vitro, then transplanted into the patient. These two approaches are known, respectively, as in vivo or ex vivo gene therapy.

[0363] In a specific embodiment, the nucleic acid sequences are directly administered in vivo, where it is expressed to produce the encoded product. This can be accomplished by any of numerous methods known in the art, e.g., by constructing them as part of an appropriate nucleic acid expression vector and administering it so that they become intracellular, e.g., by infection using defective or attenuated retrovirals or other viral vectors (see U.S. Pat. No. 4,980,286), or by direct injection of naked DNA, or by use of microparticle bombardment (e.g., a gene gun; Biolistic, Dupont), or coating with lipids or cell-surface receptors or transfecting agents, encapsulation in liposomes, microparticles, or microcapsules, or by administering them in linkage to a peptide which is known to enter the nucleus, by administering it in linkage to a ligand subject to receptor-mediated endocytosis (see, e.g., Wu and Wu, J. Biol. Chem. 262:4429-4432 (1987)) (which can be used to target cell types specifically expressing the receptors), etc. In another embodiment, nucleic acid-ligand complexes can be formed in which the ligand comprises a fusogenic viral peptide to disrupt endosomes, allowing the nucleic acid to avoid lysosomal degradation. In yet another embodiment, the nucleic acid can be targeted in vivo for cell specific uptake and expression, by targeting a specific receptor (see, e.g., PCT Publications WO 92/06180; WO 92/22635; WO92/20316; WO93/14188, WO 93/20221). Alternatively, the nucleic acid can be introduced intracellularly and incorporated within host cell DNA for expression, by homologous recombination (Koller and Smithies, Proc. Natl. Acad. Sci. USA 86:8932-8935 (1989); Zijlstra et al., Nature 342:435-438 (1989)).

[0364] In a specific embodiment, viral vectors that contain nucleic acid sequences encoding an antibody of the invention are used. For example, a retroviral vector can be used (see Miller et al., Meth. Enzymol. 217:581-599 (1993)). These retroviral vectors contain the components necessary for the correct packaging of the viral genome and integration into the host cell DNA. The nucleic acid sequences encoding the antibody to be used in gene therapy are cloned into one or more vectors, which facilitate delivery of the gene into a patient. More detail about retroviral vectors can be found in Boesen et al., Biotherapy 6:291-302 (1994), which describes the use of a retroviral vector to deliver the mdr1 gene to hematopoietic stem cells in order to make the stem cells more resistant to chemotherapy. Other references illustrating the use of retroviral vectors in gene therapy are: Clowes et al., J. Clin. Invest. 93:644-651 (1994); Kiem et al., Blood 83:1467-1473 (1994); Salmons and Gunzberg, Human Gene Therapy 4:129-141 (1993); and Grossman and Wilson, Curr. Opin. in Genetics and Devel. 3:110-114 (1993).

[0365] Adenoviruses are other viral vectors that can be used in gene therapy. Adenoviruses are especially attractive vehicles for delivering genes to respiratory epithelia. Adenoviruses naturally infect respiratory epithelia where they cause a mild disease. Other targets for adenovirus-based delivery systems are liver, the central nervous system, endothelial cells, and muscle. Adenoviruses have the advantage of being capable of infecting non-dividing cells. Kozarsky and Wilson, Current Opinion in Genetics and Development 3:499-503 (1993) present a review of adenovirus-based gene therapy. Bout et al., Human Gene Therapy 5:3-10 (1994) demonstrated the use of adenovirus vectors to transfer genes to the respiratory epithelia of rhesus monkeys. Other instances of the use of adenoviruses in gene therapy can be found in Rosenfeld et al., Science 252:431-434 (1991); Rosenfeld et al., Cell 68:143-155 (1992); Mastrangeli et al., J. Clin. Invest. 91:225-234 (1993); PCT Publication WO94/12649; and Wang, et al., Gene Therapy 2:775-783 (1995). In a preferred embodiment, adenovirus vectors are used.

[0366] Adeno-associated virus (AAV) has also been proposed for use in gene therapy (Walsh et al., Proc. Soc. Exp. Biol. Med. 204:289-300 (1993); U.S. Pat. No. 5,436,146).

[0367] Another approach to gene therapy involves transferring a gene to cells in tissue culture by such methods as electroporation, lipofection, calcium phosphate mediated transfection, or viral infection. Usually, the method of transfer includes the transfer of a selectable marker to the cells. The cells are then placed under selection to isolate those cells that have taken up and are expressing the transferred gene. Those cells are then delivered to a patient.

[0368] In this embodiment, the nucleic acid is introduced into a cell prior to administration in vivo of the resulting recombinant cell. Such introduction can be carried out by any method known in the art, including but not limited to transfection, electroporation, microinjection, infection with a viral or bacteriophage vector containing the nucleic acid sequences, cell fusion, chromosome-mediated gene transfer, microcell-mediated gene transfer, spheroplast fusion, etc. Numerous techniques are known in the art for the introduction of foreign genes into cells (see, e.g., Loeffler and Behr, Meth. Enzymol. 217:599-618 (1993); Cohen et al., Meth. Enzymol. 217:618-644 (1993); Cline, Pharmac. Ther. 29:69-92m (1985) and may be used in accordance with the present invention, provided that the necessary developmental and physiological functions of the recipient cells are not disrupted. The technique should provide for the stable transfer of the nucleic acid to the cell, so that the nucleic acid is expressible by the cell and preferably heritable and expressible by its cell progeny.

[0369] The resulting recombinant cells can be delivered to a patient by various methods known in the art. Recombinant blood cells (e.g., hematopoietic stem or progenitor cells) are preferably administered intravenously. The amount of cells envisioned for use depends on the desired effect, patient state, etc., and can be determined by one skilled in the art.

[0370] Cells into which a nucleic acid can be introduced for purposes of gene therapy encompass any desired, available cell type, and include but are not limited to epithelial cells, endothelial cells, keratinocytes, fibroblasts, muscle cells, hepatocytes; blood cells such as T lymphocytes, B lymphocytes, monocytes, macrophages, neutrophils, eosinophils, megakaryocytes, granulocytes; various stem or progenitor cells, in particular hematopoietic stem or progenitor cells, e.g., as obtained from bone marrow, umbilical cord blood, peripheral blood, fetal liver, etc.

[0371] In a preferred embodiment, the cell used for gene therapy is autologous to the patient.

[0372] In an embodiment in which recombinant cells are used in gene therapy, nucleic acid sequences encoding an antibody are introduced into the cells such that they are expressible by the cells or their progeny, and the recombinant cells are then administered in vivo for therapeutic effect. In a specific embodiment, stem or progenitor cells are used. Any stem and/or progenitor cells which can be isolated and maintained in vitro can potentially be used in accordance with this embodiment of the present invention (see e.g. PCT Publication WO 94/08598; Stemple and Anderson, Cell 71:973-985 (1992); Rheinwald, Meth. Cell Bio. 21A:229 (1980); and Pittelkow and Scott, Mayo Clinic Proc. 61:771 (1986)).

[0373] In a specific embodiment, the nucleic acid to be introduced for purposes of gene therapy comprises an inducible promoter operably linked to the coding region, such that expression of the nucleic acid is controllable by the presence or absence of an appropriate inducer of transcription.

Demonstration of Therapeutic or Prophylactic Activity

[0374] The compounds or pharmaceutical compositions of the invention are preferably tested in vitro, and then in vivo for the desired therapeutic or prophylactic activity, prior to use in humans. For example, in vitro assays to demonstrate the therapeutic or prophylactic utility of a compound or pharmaceutical composition include, the effect of a compound on a cell line or a patient tissue sample. The effect of the compound or composition on the cell line and/or tissue sample can be determined utilizing techniques known to those of skill in the art including, but not limited to, rosette formation assays and cell lysis assays. In accordance with the invention, in vitro assays which can be used to determine whether administration of a specific compound is indicated, include in vitro cell culture assays in which a patient tissue sample is grown in culture, and exposed to or otherwise administered a compound, and the effect of such compound upon the tissue sample is observed.

Therapeutic/Prophylactic Administration and Composition

[0375] The invention provides methods of treatment, inhibition and prophylaxis by administration to a subject of an effective amount of a compound or pharmaceutical composition of the invention, preferably a polypeptide or antibody of the invention. In a preferred embodiment, the compound is substantially purified (e.g., substantially free from substances that limit its effect or produce undesired side-effects). The subject is preferably an animal, including but not limited to animals such as cows, pigs, horses, chickens, cats, dogs, etc., and is preferably a mammal, and most preferably human.

[0376] Formulations and methods of administration that can be employed when the compound comprises a nucleic acid or an immunoglobulin are described above; additional appropriate formulations and routes of administration can be selected from among those described herein below.

[0377] Various delivery systems are known and can be used to administer a compound of the invention, e.g., encapsulation in liposomes, microparticles, microcapsules, recombinant cells capable of expressing the compound, receptor-mediated endocytosis (see, e.g., Wu and Wu, J. Biol. Chem. 262:4429-4432 (1987)), construction of a nucleic acid as part of a retroviral or other vector, etc. Methods of introduction include but are not limited to intradermal, intramuscular, intraperitoneal, intravenous, subcutaneous, intranasal, epidural, and oral routes. The compounds or compositions may be administered by any convenient route, for example by infusion or bolus injection, by absorption through epithelial or mucocutaneous linings (e.g., oral mucosa, rectal and intestinal mucosa, etc.) and may be administered together with other biologically active agents. Administration can be systemic or local. In addition, it may be desirable to introduce the pharmaceutical compounds or compositions of the invention into the central nervous system by any suitable route, including intraventricular and intrathecal injection; intraventricular injection may be facilitated by an intraventricular catheter, for example, attached to a reservoir, such as an Ommaya reservoir. Pulmonary administration can also be employed, e.g., by use of an inhaler or nebulizer, and formulation with an aerosolizing agent.

[0378] In a specific embodiment, it may be desirable to administer the pharmaceutical compounds or compositions of the invention locally to the area in need of treatment; this may be achieved by, for example, and not by way of limitation, local infusion during surgery, topical application, e.g., in conjunction with a wound dressing after surgery, by injection, by means of a catheter, by means of a suppository, or by means of an implant, said implant being of a porous, non-porous, or gelatinous material, including membranes, such as sialastic membranes, or fibers. Preferably, when administering a protein, including an antibody, of the invention, care must be taken to use materials to which the protein does not absorb.

[0379] In another embodiment, the compound or composition can be delivered in a vesicle, in particular a liposome (see Langer, Science 249:1527-1533 (1990); Treat et al., in Liposomes in the Therapy of Infectious Disease and Cancer, Lopez-Berestein and Fidler (eds.), Liss, New York, pp. 353-365 (1989); Lopez-Berestein, ibid., pp. 317-327; see generally ibid.)

[0380] In yet another embodiment, the compound or composition can be delivered in a controlled release system. In one embodiment, a pump may be used (see Langer, supra; Sefton, CRC Crit. Ref. Biomed. Eng. 14:201 (1987); Buchwald et al., Surgery 88:507 (1980); Saudek et al., N. Engl. J. Med. 321:574 (1989)). In another embodiment, polymeric materials can be used (see Medical Applications of Controlled Release, Langer and Wise (eds.), CRC Pres., Boca Raton, Fla. (1974); Controlled Drug Bioavailability, Drug Product Design and Performance, Smolen and Ball (eds.), Wiley, New York (1984); Ranger and Peppas, J., Macromol. Sci. Rev. Macromol. Chem. 23:61 (1983); see also Levy et al., Science 228:190 (1985); During et al., Ann. Neurol. 25:351 (1989); Howard et al., J. Neurosurg. 71:105 (1989)). In yet another embodiment, a controlled release system can be placed in proximity of the therapeutic target, e.g., the brain, thus requiring only a fraction of the systemic dose (see, e.g., Goodson, in Medical Applications of Controlled Release, supra, vol. 2, pp. 115-138 (1984)).

[0381] Other controlled release systems are discussed in the review by Langer (Science 249:1527-1533 (1990)).

[0382] In a specific embodiment where the compound of the invention is a nucleic acid encoding a protein, the nucleic acid can be administered in vivo to promote expression of its encoded protein, by constructing it as part of an appropriate nucleic acid expression vector and administering it so that it becomes intracellular, e.g., by use of a retroviral vector (see U.S. Pat. No. 4,980,286), or by direct injection, or by use of microparticle bombardment (e.g., a gene gun; Biolistic, Dupont), or coating with lipids or cell-surface receptors or transfecting agents, or by administering it in linkage to a homeobox-like peptide which is known to enter the nucleus (see e.g., Joliot et al., Proc. Natl. Acad. Sci. USA 88:1864-1868 (1991)), etc. Alternatively, a nucleic acid can be introduced intracellularly and incorporated within host cell DNA for expression, by homologous recombination.

[0383] The present invention also provides pharmaceutical compositions. Such compositions comprise a therapeutically effective amount of a compound, and a pharmaceutically acceptable carrier. In a specific embodiment, the term “pharmaceutically acceptable” means approved by a regulatory agency of the Federal or a state government or listed in the U.S. Pharmacopeia or other generally recognized pharmacopeia for use in animals, and more particularly in humans. The term “carrier” refers to a diluent, adjuvant, excipient, or vehicle with which the therapeutic is administered. Such pharmaceutical carriers can be sterile liquids, such as water and oils, including those of petroleum, animal, vegetable or synthetic origin, such as peanut oil, soybean oil, mineral oil, sesame oil and the like. Water is a preferred carrier when the pharmaceutical composition is administered intravenously. Saline solutions and aqueous dextrose and glycerol solutions can also be employed as liquid carriers, particularly for injectable solutions. Suitable pharmaceutical excipients include starch, glucose, lactose, sucrose, gelatin, malt, rice, flour, chalk, silica gel, sodium stearate, glycerol monostearate, talc, sodium chloride, dried skim milk, glycerol, propylene, glycol, water, ethanol and the like. The composition, if desired, can also contain minor amounts of wetting or emulsifying agents, or pH buffering agents. These compositions can take the form of solutions, suspensions, emulsion, tablets, pills, capsules, powders, sustained-release formulations and the like. The composition can be formulated as a suppository, with traditional binders and carriers such as triglycerides. Oral formulation can include standard carriers such as pharmaceutical grades of mannitol, lactose, starch, magnesium stearate, sodium saccharine, cellulose, magnesium carbonate, etc. Examples of suitable pharmaceutical carriers are described in “Remington's Pharmaceutical Sciences” by E. W. Martin. Such compositions will contain a therapeutically effective amount of the compound, preferably in purified form, together with a suitable amount of carrier so as to provide the form for proper administration to the patient. The formulation should suit the mode of administration.

[0384] In a preferred embodiment, the composition is formulated in accordance with routine procedures as a pharmaceutical composition adapted for intravenous administration to human beings. Typically, compositions for intravenous administration are solutions in sterile isotonic aqueous buffer. Where necessary, the composition may also include a solubilizing agent and a local anesthetic such as lignocaine to ease pain at the site of the injection. Generally, the ingredients are supplied either separately or mixed together in unit dosage form, for example, as a dry lyophilized powder or water free concentrate in a hermetically sealed container such as an ampoule or sachette indicating the quantity of active agent. Where the composition is to be administered by infusion, it can be dispensed with an infusion bottle containing sterile pharmaceutical grade water or saline. Where the composition is administered by injection, an ampoule of sterile water for injection or saline can be provided so that the ingredients may be mixed prior to administration.

[0385] The compounds of the invention can be formulated as neutral or salt forms. Pharmaceutically acceptable salts include those formed with anions such as those derived from hydrochloric, phosphoric, acetic, oxalic, tartaric acids, etc., and those formed with cations such as those derived from sodium, potassium, ammonium, calcium, ferric hydroxides, isopropylamine, triethylamine, 2-ethylamino ethanol, histidine, procaine, etc.

[0386] The amount of the compound of the invention which will be effective in the treatment, inhibition and prevention of a disease or disorder associated with aberrant expression and/or activity of a polypeptide of the invention can be determined by standard clinical techniques. In addition, in vitro assays may optionally be employed to help identify optimal dosage ranges. The precise dose to be employed in the formulation will also depend on the route of administration, and the seriousness of the disease or disorder, and should be decided according to the judgment of the practitioner and each patient's circumstances. Effective doses may be extrapolated from dose-response curves derived from in vitro or animal model test systems.

[0387] For antibodies, the dosage administered to a patient is typically 0.1 mg/kg to 100 mg/kg of the patient's body weight. Preferably, the dosage administered to a patient is between 0.1 mg/kg and 20 mg/kg of the patient's body weight, more preferably 1 mg/kg to 10 mg/kg of the patient's body weight. Generally, human antibodies have a longer half-life within the human body than antibodies from other species due to the immune response to the foreign polypeptides. Thus, lower dosages of human antibodies and less frequent administration is often possible. Further, the dosage and frequency of administration of antibodies of the invention may be reduced by enhancing uptake and tissue penetration (e.g., into the brain) of the antibodies by modifications such as, for example, lipidation.

[0388] The invention also provides a pharmaceutical pack or kit comprising one or more containers filled with one or more of the ingredients of the pharmaceutical compositions of the invention. Optionally associated with such container(s) can be a notice in the form prescribed by a governmental agency regulating the manufacture, use or sale of pharmaceuticals or biological products, which notice reflects approval by the agency of manufacture, use or sale for human administration.

Diagnosis and Imaging

[0389] Labeled antibodies, and derivatives and analogs thereof, which specifically bind to a polypeptide of interest can be used for diagnostic purposes to detect, diagnose, prognosticate, or monitor allergic and/or asthmatic diseases, disorders, and/or conditions associated with the aberrant expression and/or activity of a polypeptide of the invention. The invention provides for the detection of aberrant expression of a polypeptide of interest, comprising (a) assaying the expression of the polypeptide of interest in cells or body fluid of an individual using one or more antibodies specific to the polypeptide interest and (b) comparing the level of gene expression with a standard gene expression level, whereby an increase or decrease in the assayed polypeptide gene expression level compared to the standard expression level is indicative of aberrant expression.

[0390] The invention provides a diagnostic assay for diagnosing an allergic and/or asthmatic disease or disorder, comprising (a) assaying the expression of the polypeptide of interest in cells or body fluid of an individual using one or more antibodies specific to the polypeptide interest and (b) comparing the level of gene expression with a standard gene expression level, whereby an increase or decrease in the assayed polypeptide gene expression level compared to the standard expression level is indicative of a particular allergic and/or asthmatic disease or disorder. With respect to an allergic and/or asthmatic disease or disorder, the presence of a relatively high amount of transcript in biopsied tissue from an individual may indicate a predisposition for the development of the disease, or may provide a means for detecting the disease prior to the appearance of actual clinical symptoms. A more definitive diagnosis of this type may allow health professionals to employ preventative measures or aggressive treatment earlier thereby preventing the development or further progression of the allergic and/or asthmatic disease or disorder.

[0391] Antibodies of the invention can be used to assay protein levels in a biological sample using classical immunohistological methods known to those of skill in the art (e.g., see Jalkanen et al., J. Cell. Biol. 101:976-985 (1985); Jalkanen et al., J. Cell. Biol. 105:3087-3096 (1987)). Other antibody-based methods useful for detecting protein gene expression include immunoassays, such as the enzyme linked immunosorbent assay (ELISA) and the radioimmunoassay (RIA). Suitable antibody assay labels are known in the art and include enzyme labels, such as, glucose oxidase; radioisotopes, such as iodine (125I, 121I), carbon (14C), sulfur (35S), tritium (3H), indium (112In), and technetium (99Tc); luminescent labels, such as luminol; and fluorescent labels, such as fluorescein and rhodamine, and biotin.

[0392] One facet of the invention is the detection and diagnosis of a disease or disorder associated with aberrant expression of a polypeptide of interest in an animal, preferably a mammal and most preferably a human. In one embodiment, diagnosis comprises: a) administering (for example, parenterally, subcutaneously, or intraperitoneally) to a subject an effective amount of a labeled molecule which specifically binds to the polypeptide of interest; b) waiting for a time interval following the administering for permitting the labeled molecule to preferentially concentrate at sites in the subject where the polypeptide is expressed (and for unbound labeled molecule to be cleared to background level); c) determining background level; and d) detecting the labeled molecule in the subject, such that detection of labeled molecule above the background level indicates that the subject has a particular disease or disorder associated with aberrant expression of the polypeptide of interest. Background level can be determined by various methods including, comparing the amount of labeled molecule detected to a standard value previously determined for a particular system.

[0393] It will be understood in the art that the size of the subject and the imaging system used will determine the quantity of imaging moiety needed to produce diagnostic images. In the case of a radioisotope moiety, for a human subject, the quantity of radioactivity injected will normally range from about 5 to 20 millicuries of 99 mTc. The labeled antibody or antibody fragment will then preferentially accumulate at the location of cells that contain the specific protein. In vivo tumor imaging is described in S. W. Burchiel et al., “Immunopharmacokinetics of Radiolabeled Antibodies and Their Fragments.” (Chapter 13 in Tumor Imaging: The Radiochemical Detection of Cancer, S. W. Burchiel and B. A. Rhodes, eds., Masson Publishing Inc. (1982)).

[0394] Depending on several variables, including the type of label used and the mode of administration, the time interval following the administration for permitting the labeled molecule to preferentially concentrate at sites in the subject and for unbound labeled molecule to be cleared to background level is 6 to 48 hours or 6 to 24 hours or 6 to 12 hours. In another embodiment the time interval following administration is 5 to 20 days or 5 to 10 days.

[0395] In an embodiment, monitoring of the disease or disorder is carried out by repeating the method for diagnosing the disease or disease, for example, one month after initial diagnosis, six months after initial diagnosis, one year after initial diagnosis, etc.

[0396] Presence of the labeled molecule can be detected in the patient using methods known in the art for in vivo scanning. These methods depend upon the type of label used. Skilled artisans will be able to determine the appropriate method for detecting a particular label. Methods and devices that may be used in the diagnostic methods of the invention include, but are not limited to, computed tomography (CT), whole body scan such as position emission tomography (PET), magnetic resonance imaging (MRI), and sonography.

[0397] In a specific embodiment, the molecule is labeled with a radioisotope and is detected in the patient using a radiation responsive surgical instrument (Thurston et al., U.S. Pat. No. 5,441,050). In another embodiment, the molecule is labeled with a fluorescent compound and is detected in the patient using a fluorescence responsive scanning instrument. In another embodiment, the molecule is labeled with a positron emitting metal and is detected in the patent using positron emission-tomography. In yet another embodiment, the molecule is labeled with a paramagnetic label and is detected in a patient using magnetic resonance imaging (MRI).

Kits

[0398] The present invention provides kits that can be used in the above methods. In one embodiment, a kit comprises an antibody of the invention, preferably a purified antibody, in one or more containers. In a specific embodiment, the kits of the present invention contain a substantially isolated polypeptide comprising an epitope that is specifically immunoreactive with an antibody included in the kit. Preferably, the kits of the present invention further comprise a control antibody that does not react with the polypeptide of interest. In another specific embodiment, the kits of the present invention contain a means for detecting the binding of an antibody to a polypeptide of interest (e.g., the antibody may be conjugated to a detectable substrate such as a fluorescent compound, an enzymatic substrate, a radioactive compound or a luminescent compound, or a second antibody which recognizes the first antibody may be conjugated to a detectable substrate).

[0399] In another specific embodiment of the present invention, the kit is a diagnostic kit for use in screening serum containing antibodies specific against proliferative and/or cancerous polynucleotides and polypeptides. Such a kit may include a control antibody that does not react with the polypeptide of interest. Such a kit may include a substantially isolated polypeptide antigen comprising an epitope that is specifically immunoreactive with at least one anti-polypeptide antigen antibody. Further, such a kit includes means for detecting the binding of said antibody to the antigen (e.g., the antibody may be conjugated to a fluorescent compound such as fluorescein or rhodamine which can be detected by flow cytometry). In specific embodiments, the kit may include a recombinantly produced or chemically synthesized polypeptide antigen. The polypeptide antigen of the kit may also be attached to a solid support.

[0400] In a more specific embodiment the detecting means of the above-described kit includes a solid support to which said polypeptide antigen is attached. Such a kit may also include a non-attached reporter-labeled anti-human antibody. In this embodiment, binding of the antibody to the polypeptide antigen can be detected by binding of the said reporter-labeled antibody.

[0401] In an additional embodiment, the invention includes a diagnostic kit for use in screening serum containing antigens of the polypeptide of the invention. The diagnostic kit includes a substantially isolated antibody specifically immunoreactive with polypeptide or polynucleotide antigens, and means for detecting the binding of the polynucleotide or polypeptide antigen to the antibody. In one embodiment, the antibody is attached to a solid support. In a specific embodiment, the antibody may be a monoclonal antibody. The detecting means of the kit may include a second, labeled monoclonal antibody. Alternatively, or in addition, the detecting means may include a labeled, competing antigen.

[0402] In one diagnostic configuration, test serum is reacted with a solid phase reagent having a surface-bound antigen obtained by the methods of the present invention. After binding with specific antigen antibody to the reagent and removing unbound serum components by washing, the reagent is reacted with reporter-labeled anti-human antibody to bind reporter to the reagent in proportion to the amount of bound anti-antigen antibody on the solid support. The reagent is again washed to remove unbound labeled antibody, and the amount of reporter associated with the reagent is determined. Typically, the reporter is an enzyme that is detected by incubating the solid phase in the presence of a suitable fluorometric, luminescent or colorimetric substrate (Sigma, St. Louis, Mo.).

[0403] The solid surface reagent in the above assay is prepared by known techniques for attaching protein material to solid support material, such as polymeric beads, dip sticks, 96-well plate or filter material. These attachment methods generally include non-specific adsorption of the protein to the support or covalent attachment of the protein, typically through a free amine group, to a chemically reactive group on the solid support, such as an activated carboxyl, hydroxyl, or aldehyde group. Alternatively, streptavidin coated plates can be used in conjunction with biotinylated antigen(s).

[0404] Thus, the invention provides an assay system or kit for carrying out this diagnostic method. The kit generally includes a support with surface-bound recombinant antigens, and a reporter-labeled anti-human antibody for detecting surface-bound anti-antigen antibody.

Uses of the Polynucleotides

[0405] Each of the polynucleotides identified herein can be used in numerous ways as reagents. The following description should be considered exemplary and utilizes known techniques.

[0406] The polynucleotides of the present invention are useful for chromosome identification. There exists an ongoing need to identify new chromosome markers, since few chromosome marking reagents, based on actual sequence data (repeat polymorphisms), are presently available. Each sequence is specifically targeted to and can hybridize with a particular location on an individual human chromosome, thus each polynucleotide of the present invention can routinely be used as a chromosome marker using techniques known in the art. Table 1B.1, column 8 provides the chromosome location of some of the polynucleotides of the invention.

[0407] Briefly, sequences can be mapped to chromosomes by preparing PCR primers (preferably at least 15 bp (e.g., 15-25 bp) from the sequences shown in SEQ ID NO:X. Primers can optionally be selected using computer analysis so that primers do not span more than one predicted exon in the genomic DNA. These primers are then used for PCR screening of somatic cell hybrids containing individual human chromosomes. Only those hybrids containing the human gene corresponding to SEQ ID NO:X will yield an amplified fragment.

[0408] Similarly, somatic hybrids provide a rapid method of PCR mapping the polynucleotides to particular chromosomes. Three or more clones can be assigned per day using a single thermal cycler. Moreover, sublocalization of the polynucleotides can be achieved with panels of specific chromosome fragments. Other gene mapping strategies that can be used include in situ hybridization, prescreening with labeled flow-sorted chromosomes, preselection by hybridization to construct chromosome specific-cDNA libraries, and computer mapping techniques (See, e.g., Shuler, Trends Biotechnol 16:456-459 (1998) which is hereby incorporated by reference in its entirety).

[0409] Precise chromosomal location of the polynucleotides can also be achieved using fluorescence in situ hybridization (FISH) of a metaphase chromosomal spread. This technique uses polynucleotides as short as 500 or 600 bases; however, polynucleotides 2,000 bp are preferred. For a review of this technique, see Verma et al., “Human Chromosomes: a Manual of Basic Techniques,” Pergamon Press, New York (1988).

[0410] For chromosome mapping, the polynucleotides can be used individually (to mark a single chromosome or a single site on that chromosome) or in panels (for marking multiple sites and/or multiple chromosomes).

[0411] Thus, the present invention also provides a method for chromosomal localization which involves (a) preparing PCR primers from the polynucleotide sequences in Table 1B and/or Table 2 and SEQ ID NO:X and (b) screening somatic cell hybrids containing individual chromosomes.

[0412] The polynucleotides of the present invention would likewise be useful for radiation hybrid mapping, HAPPY mapping, and long range restriction mapping. For a review of these techniques and others known in the art, see, e.g. Dear, “Genome Mapping: A Practical Approach,” IRL Press at Oxford University Press, London (1997); Aydin, J. Mol. Med. 77:691-694 (1999); Hacia et al., Mol. Psychiatry 3:483-492 (1998); Herrick et al., Chromosome Res. 7:409-423 (1999); Hamilton et al., Methods Cell Biol. 62:265-280 (2000); and/or Ott, J. Hered. 90:68-70 (1999) each of which is hereby incorporated by reference in its entirety.

[0413] Once a polynucleotide has been mapped to a precise chromosomal location, the physical position of the polynucleotide can be used in linkage analysis. Linkage analysis establishes coinheritance between a chromosomal location and presentation of a particular disease. (Disease mapping data are found, for example, in V. McKusick, Mendelian Inheritance in Man (available on line through Johns Hopkins University Welch Medical Library)). Column 9 of Table 1B.1 provides an OMIM reference identification number of diseases associated with the cytologic band disclosed in column 8 of Table 1B.1, as determined using techniques described herein and by reference to Table 5. Assuming 1 megabase mapping resolution and one gene per 20 kb, a cDNA precisely localized to a chromosomal region associated with the disease could be one of 50-500 potential causative genes.

[0414] Thus, once coinheritance is established, differences in a polynucleotide of the invention and the corresponding gene between affected and unaffected individuals can be examined. First, visible structural alterations in the chromosomes, such as deletions or translocations, are examined in chromosome spreads or by PCR. If no structural alterations exist, the presence of point mutations are ascertained. Mutations observed in some or all affected individuals, but not in normal individuals, indicates that the mutation may cause the disease. However, complete sequencing of the polypeptide and the corresponding gene from several normal individuals is required to distinguish the mutation from a polymorphism. If a new polymorphism is identified, this polymorphic polypeptide can be used for further linkage analysis.

[0415] Furthermore, increased or decreased expression of the gene in affected individuals as compared to unaffected individuals can be assessed using the polynucleotides of the invention. Any of these alterations (altered expression, chromosomal rearrangement, or mutation) can be used as a diagnostic or prognostic marker. Diagnostic and prognostic methods, kits and reagents encompassed by the present invention are briefly described below and more thoroughly elsewhere herein (see e.g., the sections labeled “Antibodies”, “Diagnostic Assays”, and “Methods for Detecting Diseases”).

[0416] Thus, the invention also provides a diagnostic method useful during diagnosis of a disorder, involving measuring the expression level of polynucleotides of the present invention in cells or body fluid from an individual and comparing the measured gene expression level with a standard level of polynucleotide expression level, whereby an increase or decrease in the gene expression level compared to the standard is indicative of a disorder. Additional non-limiting examples of diagnostic methods encompassed by the present invention are more thoroughly described elsewhere herein (see, e.g., Example 12).

[0417] In still another embodiment, the invention includes a kit for analyzing samples for the presence of proliferative and/or cancerous polynucleotides derived from a test subject. In a general embodiment, the kit includes at least one polynucleotide probe containing a nucleotide sequence that will specifically hybridize with a polynucleotide of the invention and a suitable container. In a specific embodiment, the kit includes two polynucleotide probes defining an internal region of the polynucleotide of the invention, where each probe has one strand containing a 31′mer-end internal to the region. In a further embodiment, the probes may be useful as primers for polymerase chain reaction amplification.

[0418] Where a diagnosis of a related disorder, including, for example, diagnosis of a tumor, has already been made according to conventional methods, the present invention is useful as a prognostic indicator, whereby patients exhibiting enhanced or depressed polynucleotide of the invention expression will experience a worse clinical outcome relative to patients expressing the gene at a level nearer the standard level.

[0419] By “measuring the expression level of polynucleotides of the invention” is intended qualitatively or quantitatively measuring or estimating the level of the polypeptide of the invention or the level of the mRNA encoding the polypeptide of the invention in a first biological sample either directly (e.g., by determining or estimating absolute protein level or mRNA level) or relatively (e.g., by comparing to the polypeptide level or mRNA level in a second biological sample). Preferably, the polypeptide level or mRNA level in the first biological sample is measured or estimated and compared to a standard polypeptide level or mRNA level, the standard being taken from a second biological sample obtained from an individual not having the related disorder or being determined by averaging levels from a population of individuals not having a related disorder. As will be appreciated in the art, once a standard polypeptide level or mRNA level is known, it can be used repeatedly as a standard for comparison.

[0420] By “biological sample” is intended any biological sample obtained from an individual, body fluid, cell line, tissue culture, or other source that contains polypeptide of the present invention or the corresponding mRNA. As indicated, biological samples include body fluids (such as semen, lymph, vaginal pool, sera, plasma, urine, synovial fluid and spinal fluid) that contain the polypeptide of the present invention, and tissue sources found to express the polypeptide of the present invention. Methods for obtaining tissue biopsies and body fluids from mammals are well known in the art. Where the biological sample is to include mRNA, a tissue biopsy is the preferred source.

[0421] The method(s) provided above may preferably be applied in a diagnostic method and/or kits in which polynucleotides and/or polypeptides of the invention are attached to a solid support. In one exemplary method, the support may be a “gene chip” or a “biological chip” as described in U.S. Pat. Nos. 5,837,832, 5,874,219, and 5,856,174. Further, such a gene chip with polynucleotides of the invention attached may be used to identify polymorphisms between the isolated polynucleotide sequences of the invention, with polynucleotides isolated from a test subject. The knowledge of such polymorphisms (i.e. their location, as well as, their existence) would be beneficial in identifying disease loci for many disorders, such as for example, in neural disorders, immune system disorders, muscular disorders, reproductive disorders, gastrointestinal disorders, pulmonary disorders, digestive disorders, metabolic disorders, cardiovascular disorders, renal disorders, proliferative disorders, and/or cancerous diseases and conditions. Such a method is described in U.S. Pat. Nos. 5,858,659 and 5,856,104. The US patents referenced supra are hereby incorporated by reference in their entirety herein.

[0422] The present invention encompasses polynucleotides of the present invention that are chemically synthesized, or reproduced as peptide nucleic acids (PNA), or according to other methods known in the art. The use of PNAs would serve as the preferred form if the polynucleotides of the invention are incorporated onto a solid support, or gene chip. For the purposes of the present invention, a peptide nucleic acid (PNA) is a polyamide type of DNA analog and the monomeric units for adenine, guanine, thymine and cytosine are available commercially (Perceptive Biosystems). Certain components of DNA, such as phosphorus, phosphorus oxides, or deoxyribose derivatives, are not present in PNAs. As disclosed by Nielsen et al., Science 254, 1497 (1991); and Egholm et al., Nature 365, 666 (1993), PNAs bind specifically and tightly to complementary DNA strands and are not degraded by nucleases. In fact, PNA binds more strongly to DNA than DNA itself does. This is probably because there is no electrostatic repulsion between the two strands, and also the polyamide backbone is more flexible. Because of this, PNA/DNA duplexes bind under a wider range of stringency conditions than DNA/DNA duplexes, making it easier to perform multiplex hybridization. Smaller probes can be used than with DNA due to the strong binding. In addition, it is more likely that single base mismatches can be determined with PNA/DNA hybridization because a single mismatch in a PNA/DNA 15-mer lowers the melting point (T.sub.m) by 8°-20° C., vs. 4°-16° C. for the DNA/DNA 15-mer duplex. Also, the absence of charge groups in PNA means that hybridization can be done at low ionic strengths and reduce possible interference by salt during the analysis.

[0423] The compounds of the present invention have uses that include, but are not limited to, detecting cancer in mammals. In particular the invention is useful during diagnosis of pathological cell proliferative neoplasias which include, but are not limited to: acute myelogenous leukemias including acute monocytic leukemia, acute myeloblastic leukemia, acute promyelocytic leukemia, acute myelomonocytic leukemia, acute erythroleukemia, acute megakaryocytic leukemia, and acute undifferentiated leukemia, etc.; and chronic myelogenous leukemias including chronic myelomonocytic leukemia, chronic granulocytic leukemia, etc. Preferred mammals include monkeys, apes, cats, dogs, cows, pigs, horses, rabbits and humans. Particularly preferred are humans.

[0424] Pathological cell proliferative disorders are often associated with inappropriate activation of proto-oncogenes. (Gelmann, E. P. et al., “The Etiology of Acute Leukemia: Molecular Genetics and Viral Oncology,” in Neoplastic Diseases of the Blood, Vol 1, Wiernik, P. H. et al. eds., 161-182 (1985)). Neoplasias are now believed to result from the qualitative alteration of a normal cellular gene product, or from the quantitative modification of gene expression by insertion into the chromosome of a viral sequence, by chromosomal translocation of a gene to a more actively transcribed region, or by some other mechanism. (Gelmann et al., supra) It is likely that mutated or altered expression of specific genes is involved in the pathogenesis of some leukemias, among other tissues and cell types. (Gelmann et al., supra) Indeed, the human counterparts of the oncogenes involved in some animal neoplasias have been amplified or translocated in some cases of human leukemia and carcinoma. (Gelmann et al., supra)

[0425] For example, c-myc expression is highly amplified in the non-lymphocytic leukemia cell line HL-60. When HL-60 cells are chemically induced to stop proliferation, the level of c-myc is found to be downregulated. (International Publication Number WO 91/15580). However, it has been shown that exposure of HL-60 cells to a DNA construct that is complementary to the 5′ end of c-myc or c-myb blocks translation of the corresponding mRNAs which down-regulates expression of the c-myc or c-myb proteins and causes arrest of cell proliferation and differentiation of the treated cells. (International Publication Number WO 91/15580; Wickstrom et al., Proc. Natl. Acad. Sci. 85:1028 (1988); Anfossi et al., Proc. Natl. Acad. Sci. 86:3379 (1989)). However, the skilled artisan would appreciate the present invention's usefulness is not be limited to treatment, prevention, and/or prognosis of proliferative disorders of cells and tissues of hematopoietic origin, in light of the numerous cells and cell types of varying origins which are known to exhibit proliferative phenotypes.

[0426] In addition to the foregoing, a polynucleotide of the present invention can be used to control gene expression through triple helix formation or through antisense DNA or RNA. Antisense techniques are discussed, for example, in Okano, J. Neurochem. 56: 560 (1991); “Oligodeoxynucleotides as Antisense Inhibitors of Gene Expression, CRC Press, Boca Raton, Fla. (1988). Triple helix formation is discussed in, for instance Lee et al., Nucleic Acids Research 6: 3073 (1979); Cooney et al., Science 241: 456 (1988); and Dervan et al., Science 251: 1360 (1991). Both methods rely on binding of the polynucleotide to a complementary DNA or RNA. For these techniques, preferred polynucleotides are usually oligonucleotides 20 to 40 bases in length and complementary to either the region of the gene involved in transcription (triple helix—see Lee et al., Nucl. Acids Res. 6:3073 (1979); Cooney et al., Science 241:456 (1988); and Dervan et al., Science 251:1360 (1991)) or to the mRNA itself (antisense—Okano, J. Neurochem. 56:560 (1991); Oligodeoxy-nucleotides as Antisense Inhibitors of Gene Expression, CRC Press, Boca Raton, Fla. (1988)). Triple helix formation optimally results in a shut-off of RNA transcription from DNA, while antisense RNA hybridization blocks translation of an mRNA molecule into polypeptide. The oligonucleotide described above can also be delivered to cells such that the antisense RNA or DNA may be expressed in vivo to inhibit production of polypeptide of the present invention antigens. Both techniques are effective in model systems, and the information disclosed herein can be used to design antisense or triple helix polynucleotides in an effort to treat disease, and in particular, for the treatment of proliferative diseases and/or conditions. Non-limiting antisense and triple helix methods encompassed by the present invention are more thoroughly described elsewhere herein (see, e.g., the section labeled “Antisense and Ribozyme (Antagonists)”).

[0427] Polynucleotides of the present invention are also useful in gene therapy. One goal of gene therapy is to insert a normal gene into an organism having a defective gene, in an effort to correct the genetic defect. The polynucleotides disclosed in the present invention offer a means of targeting such genetic defects in a highly accurate manner. Another goal is to insert a new gene that was not present in the host genome, thereby producing a new trait in the host cell. Additional non-limiting examples of gene therapy methods encompassed by the present invention are more thoroughly described elsewhere herein (see, e.g., the sections labeled “Gene Therapy Methods”, and Examples 16, 17 and 18).

[0428] The polynucleotides are also useful for identifying individuals from minute biological samples. The United States military, for example, is considering the use of restriction fragment length polymorphism (RFLP) for identification of its personnel. In this technique, an individual's genomic DNA is digested with one or more restriction enzymes, and probed on a Southern blot to yield unique bands for identifying personnel. This method does not suffer from the current limitations of “Dog Tags” which can be lost, switched, or stolen, making positive identification difficult. The polynucleotides of the present invention can be used as additional DNA markers for RFLP.

[0429] The polynucleotides of the present invention can also be used as an alternative to RFLP, by determining the actual base-by-base DNA sequence of selected portions of an individual's genome. These sequences can be used to prepare PCR primers for amplifying and isolating such selected DNA, which can then be sequenced. Using this technique, individuals can be identified because each individual will have a unique set of DNA sequences. Once an unique ID database is established for an individual, positive identification of that individual, living or dead, can be made from extremely small tissue samples.

[0430] Forensic biology also benefits from using DNA-based identification techniques as disclosed herein. DNA sequences taken from very small biological samples such as tissues, e.g., hair or skin, or body fluids, e.g., blood, saliva, semen, synovial fluid, amniotic fluid, breast milk, lymph, pulmonary sputum or surfactant, urine, fecal matter, etc., can be amplified using PCR. In one prior art technique, gene sequences amplified from polymorphic loci, such as DQa class II HLA gene, are used in forensic biology to identify individuals. (Erlich, H., PCR Technology, Freeman and Co. (1992)). Once these specific polymorphic loci are amplified, they are digested with one or more restriction enzymes, yielding an identifying set of bands on a Southern blot probed with DNA corresponding to the DQa class II HLA gene. Similarly, polynucleotides of the present invention can be used as polymorphic markers for forensic purposes.

[0431] There is also a need for reagents capable of identifying the source of a particular tissue. Such need arises, for example, in forensics when presented with tissue of unknown origin. Appropriate reagents can comprise, for example, DNA probes or primers prepared from the sequences of the present invention, specific to tissues, including but not limited to those shown in Table 1B. Panels of such reagents can identify tissue by species and/or by organ type. In a similar fashion, these reagents can be used to screen tissue cultures for contamination. Additional non-limiting examples of such uses are further described herein.

[0432] The polynucleotides of the present invention are also useful as hybridization probes for differential identification of the tissue(s) or cell type(s) present in a biological sample. Similarly, polypeptides and antibodies directed to polypeptides of the present invention are useful to provide immunological probes for differential identification of the tissue(s) (e.g., immunohistochemistry assays) or cell type(s) (e.g., immunocytochemistry assays). In addition, for a number of disorders of the above tissues or cells, significantly higher or lower levels of gene expression of the polynucleotides/polypeptides of the present invention may be detected in certain tissues (e.g., tissues expressing polypeptides and/or polynucleotides of the present invention, for example, those disclosed in column 7 of Table 1B.1, and/or cancerous and/or wounded tissues) or bodily fluids (e.g., semen, lymph, vaginal pool, serum, plasma, urine, synovial fluid or spinal fluid) taken from an individual having such a disorder, relative to a “standard” gene expression level, i.e., the expression level in healthy tissue from an individual not having the disorder.

[0433] Thus, the invention provides a diagnostic method of a disorder, which involves: (a) assaying gene expression level in cells or body fluid of an individual; (b) comparing the gene expression level with a standard gene expression level, whereby an increase or decrease in the assayed gene expression level compared to the standard expression level is indicative of a disorder.

[0434] In the very least, the polynucleotides of the present invention can be used as molecular weight markers on Southern gels, as diagnostic probes for the presence of a specific mRNA in a particular cell type, as a probe to “subtract-out” known sequences in the process of discovering novel polynucleotides, for selecting and making oligomers for attachment to a “gene chip” or other support, to raise anti-DNA antibodies using DNA immunization techniques, and as an antigen to elicit an immune response.

Uses of the Polypeptides

[0435] Each of the polypeptides identified herein can be used in numerous ways. The following description should be considered exemplary and utilizes known techniques.

[0436] Polypeptides and antibodies directed to polypeptides of the present invention are useful to provide immunological probes for differential identification of the tissue(s) (e.g., immunohistochemistry assays such as, for example, ABC immunoperoxidase (Hsu et al., J. Histochem. Cytochem. 29:577-580 (1981)) or cell type(s) (e.g., immunocytochemistry assays).

[0437] Antibodies can be used to assay levels of polypeptides encoded by polynucleotides of the invention in a biological sample using classical immunohistological methods known to those of skill in the art (e.g., see Jalkanen, et al., J. Cell. Biol. 101:976-985 (1985); Jalkanen, et al., J. Cell. Biol. 105:3087-3096 (1987)). Other antibody-based methods useful for detecting protein gene expression include immunoassays, such as the enzyme linked immunosorbent assay (ELISA) and the radioimmunoassay (RIA). Suitable antibody assay labels are known in the art and include enzyme labels, such as, glucose oxidase; radioisotopes, such as iodine (¹³¹I, ¹²⁵I, ¹²³I, ¹²¹I), carbon (¹⁴C), sulfur (³⁵S), tritium (³H), indium (^{115m}In, ^{113m}In, ¹¹²In, ¹¹¹In), and technetium (⁹⁹Tc, ^{99m}Tc), thallium (²⁰¹Ti), gallium (⁶⁸Ga, ⁶⁷Ga), palladium (¹⁰³Pd), molybdenum (⁹⁹Mo), xenon (¹³³Xe), fluorine (¹⁸F), ¹⁵³Sm, ¹⁷⁷Lu, ¹⁵⁹Gd, ¹⁴⁹Pm, ¹⁴⁰La, ¹⁷⁵Yb, ¹⁶⁶Ho, ⁹⁰Y, ⁴⁷Sc, ¹⁸⁶Re, ¹⁸⁸Re, ¹⁴²Pr, ¹⁰⁵Rh, ⁹⁷Ru; luminescent labels, such as luminol; and fluorescent labels, such as fluorescein and rhodamine, and biotin.

[0438] In addition to assaying levels of polypeptide of the present invention in a biological sample, proteins can also be detected in vivo by imaging. Antibody labels or markers for in vivo imaging of protein include those detectable by X-radiography, NMR or ESR. For X-radiography, suitable labels include radioisotopes such as barium or cesium, which emit detectable radiation but are not overtly harmful to the subject. Suitable markers for NMR and ESR include those with a detectable characteristic spin, such as deuterium, which may be incorporated into the antibody by labeling of nutrients for the relevant hybridoma.

[0439] A protein-specific antibody or antibody fragment which has been labeled with an appropriate detectable imaging moiety, such as a radioisotope (for example, ¹³¹I, ¹¹²In, ^{99m}Tc, (¹³¹I, ¹²⁵I, ¹²³I, ¹²¹I), carbon (¹⁴C), sulfur (³⁵S), tritium (³H), indium (^{115m}In, ^{113m}In, ¹¹²In, ¹¹¹In), and technetium (⁹⁹Tc, ^{99m}Tc), thallium (²⁰¹Ti), gallium (⁶⁸Ga, ⁶⁷Ga), palladium (¹⁰³Pd), molybdenum (⁹⁹Mo), xenon (¹³³Xe), fluorine (¹⁸F, ¹⁵³Sm, ¹⁷⁷Lu, ¹⁵⁹Gd, ¹⁴⁹Pm, ¹⁴⁰La, ¹⁷⁵Yb, ¹⁶⁶Ho, ⁹⁰Y, ⁴⁷Sc, ¹⁸⁶Re, ¹⁸⁸Re, ¹⁴²Pr, ¹⁰⁵Rh, ⁹⁷Ru), a radio-opaque substance, or a material detectable by nuclear magnetic resonance, is introduced (for example, parenterally, subcutaneously or intraperitoneally) into the mammal to be examined for immune system disorder. It will be understood in the art that the size of the subject and the imaging system used will determine the quantity of imaging moiety needed to produce diagnostic images. In the case of a radioisotope moiety, for a human subject, the quantity of radioactivity injected will normally range from about 5 to 20 millicuries of ^{99m}Tc. The labeled antibody or antibody fragment will then preferentially accumulate at the location of cells that express the polypeptide encoded by a polynucleotide of the invention. In vivo tumor imaging is described in S. W. Burchiel et al., “Immunopharmacokinetics of Radiolabeled Antibodies and Their Fragments” (Chapter 13 in Tumor Imaging: The Radiochemical Detection of Cancer, S. W. Burchiel and B. A. Rhodes, eds., Masson Publishing Inc. (1982)).

[0440] In one embodiment, the invention provides a method for the specific delivery of compositions of the invention to cells by administering polypeptides of the invention (e.g., polypeptides encoded by polynucleotides of the invention and/or antibodies) that are associated with heterologous polypeptides or nucleic acids. In one example, the invention provides a method for delivering a therapeutic protein into the targeted cell. In another example, the invention provides a method for delivering a single stranded nucleic acid (e.g., antisense or ribozymes) or double stranded nucleic acid (e.g., DNA that can integrate into the cell's genome or replicate episomally and that can be transcribed) into the targeted cell.

[0441] In another embodiment, the invention provides a method for the specific destruction of cells (e.g., the destruction of tumor cells) by administering polypeptides of the invention in association with toxins or cytotoxic prodrugs.

[0442] By “toxin” is meant one or more compounds that bind and activate endogenous cytotoxic effector systems, radioisotopes, holotoxins, modified toxins, catalytic subunits of toxins, or any molecules or enzymes not normally present in or on the surface of a cell that under defined conditions cause the cell's death. Toxins that may be used according to the methods of the invention include, but are not limited to, radioisotopes known in the art, compounds such as, for example, antibodies (or complement fixing containing portions thereof) that bind an inherent or induced endogenous cytotoxic effector system, thymidine kinase, endonuclease, RNAse, alpha toxin, ricin, abrin, Pseudomonas exotoxin A, diphtheria toxin, saporin, momordin, gelonin, pokeweed antiviral protein, alpha-sarcin and cholera toxin. “Toxin” also includes a cytostatic or cytocidal agent, a therapeutic agent or a radioactive metal ion, e.g., alpha-emitters such as, for example, ²¹³Bi, or other radioisotopes such as, for example, ¹⁰³Pd, ¹³³Xe, ¹³¹I, ⁶⁸Ge, ⁵⁷Co, ⁶⁵Zn, ⁸⁵Sr, ³²P, ³⁵S, ⁹⁰Y, ¹⁵³Sm, ¹⁵³Gd, ¹⁶⁹Yb, ⁵¹Cr, ⁵⁴Mn, ⁷⁵Se, ¹¹³Sn, ⁹⁰Yttrium, ¹¹⁷Tin, ¹⁸⁶Rhenium, ¹⁶⁶Holmium, and ¹⁸⁸Rhenium; luminescent labels, such as luminol; and fluorescent labels, such as fluorescein and rhodamine, and biotin. In a specific embodiment, the invention provides a method for the specific destruction of cells (e.g., the destruction of tumor cells) by administering polypeptides of the invention or antibodies of the invention in association with the radioisotope ⁹⁰Y. In another specific embodiment, the invention provides a method for the specific destruction of cells (e.g., the destruction of tumor cells) by administering polypeptides of the invention or antibodies of the invention in association with the radioisotope ¹¹¹In. In a further specific embodiment, the invention provides a method for the specific destruction of cells (e.g., the destruction of tumor cells) by administering polypeptides of the invention or antibodies of the invention in association with the radioisotope ¹³¹I.

[0443] Techniques known in the art may be applied to label polypeptides of the invention (including antibodies). Such techniques include, but are not limited to, the use of bifunctional conjugating agents (see e.g., U.S. Pat. Nos. 5,756,065; 5,714,631; 5,696,239; 5,652,361; 5,505,931; 5,489,425; 5,435,990; 5,428,139; 5,342,604; 5,274,119; 4,994,560; and 5,808,003; the contents of each of which are hereby incorporated by reference in its entirety).

[0444] Thus, the invention provides a diagnostic method of a disorder, which involves (a) assaying the expression level of a polypeptide of the present invention in cells or body fluid of an individual; and (b) comparing the assayed polypeptide expression level with a standard polypeptide expression level, whereby an increase or decrease in the assayed polypeptide expression level compared to the standard expression level is indicative of a disorder. With respect to cancer, the presence of a relatively high amount of transcript in biopsied tissue from an individual may indicate a predisposition for the development of the disease, or may provide a means for detecting the disease prior to the appearance of actual clinical symptoms. A more definitive diagnosis of this type may allow health professionals to employ preventative measures or aggressive treatment earlier thereby preventing the development or further progression of the cancer.

[0445] Moreover, polypeptides of the present invention can be used to treat or prevent diseases or conditions such as, for example, neural disorders, immune system disorders, muscular disorders, reproductive disorders, gastrointestinal disorders, pulmonary disorders, cardiovascular disorders, renal disorders, proliferative disorders, and/or cancerous diseases and conditions. For example, patients can be administered a polypeptide of the present invention in an effort to replace absent or decreased levels of the polypeptide (e.g., insulin), to supplement absent or decreased levels of a different polypeptide (e.g., hemoglobin S for hemoglobin B, SOD, catalase, DNA repair proteins), to inhibit the activity of a polypeptide (e.g., an oncogene or tumor supressor), to activate the activity of a polypeptide (e.g., by binding to a receptor), to reduce the activity of a membrane bound receptor by competing with it for free ligand (e.g., soluble TNF receptors used in reducing inflammation), or to bring about a desired response (e.g., blood vessel growth inhibition, enhancement of the immune response to proliferative cells or tissues).

[0446] Similarly, antibodies directed to a polypeptide of the present invention can also be used to treat disease (as described supra, and elsewhere herein). For example, administration of an antibody directed to a polypeptide of the present invention can bind, and/or neutralize the polypeptide, and/or reduce overproduction of the polypeptide. Similarly, administration of an antibody can activate the polypeptide, such as by binding to a polypeptide bound to a membrane (receptor).

[0447] At the very least, the polypeptides of the present invention can be used as molecular weight markers on SDS-PAGE gels or on molecular sieve gel filtration columns using methods well known to those of skill in the art. Polypeptides can also be used to raise antibodies, which in turn are used to measure protein expression from a recombinant cell, as a way of assessing transformation of the host cell. Moreover, the polypeptides of the present invention can be used to test the biological activities described herein.

Diagnostic Assays

[0448] The compounds of the present invention are useful for diagnosis, treatment, prevention and/or prognosis of various disorders in mammals, preferably humans. Such disorders include, but are not limited to, those related to biological activities described in Table 1D and, also as described herein under the section heading “Biological Activities”.

[0449] For a number of disorders, substantially altered (increased or decreased) levels of gene expression can be detected in tissues, cells or bodily fluids (e.g., sera, plasma, urine, semen, synovial fluid or spinal fluid) taken from an individual having such a disorder, relative to a “standard” gene expression level, that is, the expression level in tissues or bodily fluids from an individual not having the disorder. Thus, the invention provides a diagnostic method useful during diagnosis of a disorder, which involves measuring the expression level of the gene encoding the polypeptide in tissues, cells or body fluid from an individual and comparing the measured gene expression level with a standard gene expression level, whereby an increase or decrease in the gene expression level(s) compared to the standard is indicative of a disorder. These diagnostic assays may be performed in vivo or in vitro, such as, for example, on blood samples, biopsy tissue or autopsy tissue.

[0450] The present invention is also useful as a prognostic indicator, whereby patients exhibiting enhanced or depressed gene expression will experience a worse clinical outcome relative to patients expressing the gene at a level nearer the standard level.

[0451] In certain embodiments, a polypeptide of the invention, or polynucleotides, antibodies, agonists, or antagonists corresponding to that polypeptide, may be used to diagnose and/or prognosticate diseases and/or disorders associated with the tissue(s) in which the polypeptide of the invention is expressed, including one, two, three, four, five, or more tissues disclosed in Table 1B.2, column 5 (Tissue Distribution Library Code).

[0452] By “assaying the expression level of the gene encoding the polypeptide” is intended qualitatively or quantitatively measuring or estimating the level of the polypeptide of the invention or the level of the mRNA encoding the polypeptide of the invention in a first biological sample either directly (e.g., by determining or estimating absolute protein level or mRNA level) or relatively (e.g., by comparing to the polypeptide level or mRNA level in a second biological sample). Preferably, the polypeptide expression level or mRNA level in the first biological sample is measured or estimated and compared to a standard polypeptide level or mRNA level, the standard being taken from a second biological sample obtained from an individual not having the disorder or being determined by averaging levels from a population of individuals not having the disorder. As will be appreciated in the art, once a standard polypeptide level or mRNA level is known, it can be used repeatedly as a standard for comparison.

[0453] By “biological sample” is intended any biological sample obtained from an individual, cell line, tissue culture, or other source containing polypeptides of the invention (including portions thereof) or mRNA. As indicated, biological samples include body fluids (such as sera, plasma, urine, synovial fluid and spinal fluid) and tissue sources found to express the full length or fragments thereof of a polypeptide or mRNA. Methods for obtaining tissue biopsies and body fluids from mammals are well known in the art. Where the biological sample is to include mRNA, a tissue biopsy is the preferred source.

[0454] Total cellular RNA can be isolated from a biological sample using any suitable technique such as the single-step guanidinium-thiocyanate-phenol-chloroform method described in Chomczynski and Sacchi, Anal. Biochem. 162:156-159 (1987). Levels of mRNA encoding the polypeptides of the invention are then assayed using any appropriate method. These include Northern blot analysis, S1 nuclease mapping, the polymerase chain reaction (PCR), reverse transcription in combination with the polymerase chain reaction (RT-PCR), and reverse transcription in combination with the ligase chain reaction (RT-LCR).

[0455] The present invention also relates to diagnostic assays such as quantitative and diagnostic assays for detecting levels of polypeptides of the invention, in a biological sample (e.g., cells and tissues), including determination of normal and abnormal levels of polypeptides. Thus, for instance, a diagnostic assay in accordance with the invention for detecting over-expression of polypeptides of the invention compared to normal control tissue samples may be used to detect the presence of tumors. Assay techniques that can be used to determine levels of a polypeptide, such as a polypeptide of the present invention in a sample derived from a host are well-known to those of skill in the art. Such assay methods include radioimmunoassays, competitive-binding assays, Western Blot analysis and ELISA assays. Assaying polypeptide levels in a biological sample can occur using any art-known method.

[0456] Assaying polypeptide levels in a biological sample can occur using antibody-based techniques. For example, polypeptide expression in tissues can be studied with classical immunohistological methods (Jalkanen et al., J. Cell. Biol. 101:976-985 (1985); Jalkanen, M., et al., J. Cell. Biol. 105:3087-3096 (1987)). Other antibody-based methods useful for detecting polypeptide gene expression include immunoassays, such as the enzyme linked immunosorbent assay (ELISA) and the radioimmunoassay (RIA). Suitable antibody assay labels are known in the art and include enzyme labels, such as, glucose oxidase, and radioisotopes, such as iodine (¹²⁵I, ¹²¹I), carbon (¹⁴C), sulfur (³⁵S), tritium (³H), indium (¹¹²In), and technetium (^{99m}Tc), and fluorescent labels, such as fluorescein and rhodamine, and biotin.

[0457] The tissue or cell type to be analyzed will generally include those that are known, or suspected, to express the gene of inteest (such as, for example, cancer). The protein isolation methods employed herein may, for example, be such as those described in Harlow and Lane (Harlow, E. and Lane, D., 1988, “Antibodies: A Laboratory Manual”, Cold Spring Harbor Laboratory Press, Cold Spring Harbor, N.Y.), which is incorporated herein by reference in its entirety. The isolated cells can be derived from cell culture or from a patient. The analysis of cells taken from culture may be a necessary step in the assessment of cells that could be used as part of a cell-based gene therapy technique or, alternatively, to test the effect of compounds on the expression of the gene.

[0458] For example, antibodies, or fragments of antibodies, such as those described herein, may be used to quantitatively or qualitatively detect the presence of gene products or conserved variants or peptide fragments thereof. This can be accomplished, for example, by immunofluorescence techniques employing a fluorescently labeled antibody coupled with light microscopic, flow cytometric, or fluorimetric detection.

[0459] In a preferred embodiment, antibodies, or fragments of antibodies directed to any one or all of the predicted epitope domains of the polypeptides of the invention (shown in Table 1B) may be used to quantitatively or qualitatively detect the presence of gene products or conserved variants or peptide fragments thereof. This can be accomplished, for example, by immunofluorescence techniques employing a fluorescently labeled antibody coupled with light microscopic, flow cytometric, or fluorimetric detection.

[0460] In an additional preferred embodiment, antibodies, or fragments of antibodies directed to a conformational epitope of a polypeptide of the invention may be used to quantitatively or qualitatively detect the presence of gene products or conserved variants or peptide fragments thereof. This can be accomplished, for example, by immunofluorescence techniques employing a fluorescently labeled antibody coupled with light microscopic, flow cytometric, or fluorimetric detection.

[0461] The antibodies (or fragments thereof), and/or polypeptides of the present invention may, additionally, be employed histologically, as in immunofluorescence, immunoelectron microscopy or non-immunological assays, for in situ detection of gene products or conserved variants or peptide fragments thereof. In situ detection may be accomplished by removing a histological specimen from a patient, and applying thereto a labeled antibody or polypeptide of the present invention. The antibody (or fragment thereof) or polypeptide is preferably applied by overlaying the labeled antibody (or fragment) onto a biological sample. Through the use of such a procedure, it is possible to determine not only the presence of the gene product, or conserved variants or peptide fragments, or polypeptide binding, but also its distribution in the examined tissue. Using the present invention, those of ordinary skill will readily perceive that any of a wide variety of histological methods (such as staining procedures) can be modified in order to achieve such in situ detection.

[0462] Immunoassays and non-immunoassays for gene products or conserved variants or peptide fragments thereof will typically comprise incubating a sample, such as a biological fluid, a tissue extract, freshly harvested cells, or lysates of cells which have been incubated in cell culture, in the presence of a detectably labeled antibody capable of binding gene products or conserved variants or peptide fragments thereof, and detecting the bound antibody by any of a number of techniques well-known in the art.

[0463] The biological sample may be brought in contact with and immobilized onto a solid phase support or carrier such as nitrocellulose, or other solid support that is capable of immobilizing cells, cell particles or soluble proteins. The support may then be washed with suitable buffers followed by treatment with the detectably labeled antibody or detectable polypeptide of the invention. The solid phase support may then be washed with the buffer a second time to remove unbound antibody or polypeptide. Optionally the antibody is subsequently labeled. The amount of bound label on solid support may then be detected by conventional means.

[0464] By “solid phase support or carrier” is intended any support capable of binding an antigen or an antibody. Well-known supports or carriers include glass, polystyrene, polypropylene, polyethylene, dextran, nylon, amylases, natural and modified celluloses, polyacrylamides, gabbros, and magnetite. The nature of the carrier can be either soluble to some extent or insoluble for the purposes of the present invention. The support material may have virtually any possible structural configuration so long as the coupled molecule is capable of binding to an antigen or antibody. Thus, the support configuration may be spherical, as in a bead, or cylindrical, as in the inside surface of a test tube, or the external surface of a rod. Alternatively, the surface may be flat such as a sheet, test strip, etc. Preferred supports include polystyrene beads. Those skilled in the art will know many other suitable carriers for binding antibody or antigen, or will be able to ascertain the same by use of routine experimentation.

[0465] The binding activity of a given lot of antibody or antigen polypeptide may be determined according to well-known methods. Those skilled in the art will be able to determine operative and optimal assay conditions for each determination by employing routine experimentation.

[0466] In addition to assaying polypeptide levels or polynucleotide levels in a biological sample obtained from an individual, polypeptide or polynucleotide can also be detected in vivo by imaging. For example, in one embodiment of the invention, polypeptides and/or antibodies of the invention are used to image diseased cells, such as neoplasms. In another embodiment, polynucleotides of the invention (e.g., polynucleotides complementary to all or a portion of an mRNA) and/or antibodies (e.g., antibodies directed to any one or a combination of the epitopes of a polypeptide of the invention, antibodies directed to a conformational epitope of a polypeptide of the invention, or antibodies directed to the full length polypeptide expressed on the cell surface of a mammalian cell) are used to image diseased or neoplastic cells.

[0467] Antibody labels or markers for in vivo imaging of polypeptides of the invention include those detectable by X-radiography, NMR, MRI, CAT-scans or ESR. For X-radiography, suitable labels include radioisotopes such as barium or cesium, which emit detectable radiation but are not overtly harmful to the subject. Suitable markers for NMR and ESR include those with a detectable characteristic spin, such as deuterium, which may be incorporated into the antibody by labeling of nutrients for the relevant hybridoma. Where in vivo imaging is used to detect enhanced levels of polypeptides for diagnosis in humans, it may be preferable to use human antibodies or “humanized” chimeric monoclonal antibodies. Such antibodies can be produced using techniques described herein or otherwise known in the art. For example methods for producing chimeric antibodies are known in the art. See, for review, Morrison, Science 229:1202 (1985); Oi et al., BioTechniques 4:214 (1986); Cabilly et al., U.S. Pat. No. 4,816,567; Taniguchi et al., EP 171496; Morrison et al., EP 173494; Neuberger et al., WO 8601533; Robinson et al., WO 8702671; Boulianne et al., Nature 312:643 (1984); Neuberger et al., Nature 314:268 (1985).

[0468] Additionally, any polypeptides of the invention whose presence can be detected can be administered. For example, polypeptides of the invention labeled with a radio-opaque or other appropriate compound can be administered and visualized in vivo, as discussed, above for labeled antibodies. Further, such polypeptides can be utilized for in vitro diagnostic procedures.

[0469] A polypeptide-specific antibody or antibody fragment that has been labeled with an appropriate detectable imaging moiety, such as a radioisotope (for example, ¹³¹I, ¹¹²In, ^{99m}Tc), a radio-opaque substance, or a material detectable by nuclear magnetic resonance, is introduced (for example, parenterally, subcutaneously or intraperitoneally) into the mammal to be examined for a disorder. It will be understood in the art that the size of the subject and the imaging system used will determine the quantity of imaging moiety needed to produce diagnostic images. In the case of a radioisotope moiety, for a human subject, the quantity of radioactivity injected will normally range from about 5 to 20 millicuries of ^{99m}Tc. The labeled antibody or antibody fragment will then preferentially accumulate at the location of cells that contain the antigenic protein. In vivo tumor imaging is described in S. W. Burchiel et al., “Immunopharmacokinetics of Radiolabeled Antibodies and Their Fragments” (Chapter 13 in Tumor Imaging: The Radiochemical Detection of Cancer, S. W. Burchiel and B. A. Rhodes, eds., Masson Publishing Inc. (1982)).

[0470] With respect to antibodies, one of the ways in which an antibody of the present invention can be detectably labeled is by linking the same to a reporter enzyme and using the linked product in an enzyme immunoassay (EIA) (Voller, A., “The Enzyme Linked Immunosorbent Assay (ELISA)”, 1978, Diagnostic Horizons 2:1-7, Microbiological Associates Quarterly Publication, Walkersville, Md.); Voller et al., J. Clin. Pathol. 31:507-520 (1978); Butler, J. E., Meth. Enzymol. 73:482-523 (1981); Maggio, E. (ed.), 1980, Enzyme Immunoassay, CRC Press, Boca Raton, Fla.; Ishikawa, E. et al., (eds.), 1981, Enzyme Immunoassay, Kgaku Shoin, Tokyo). The reporter enzyme that is bound to the antibody will react with an appropriate substrate, preferably a chromogenic substrate, in such a manner as to produce a chemical moiety which can be detected, for example, by spectrophotometric, fluorimetric or by visual means. Reporter enzymes which can be used to detectably label the antibody include, but are not limited to, malate dehydrogenase, staphylococcal nuclease, delta-5-steroid isomerase, yeast alcohol dehydrogenase, alpha-glycerophosphate, dehydrogenase, triose phosphate isomerase, horseradish peroxidase, alkaline phosphatase, asparaginase, glucose oxidase, beta-galactosidase, ribonuclease, urease, catalase, glucose-6-phosphate dehydrogenase, glucoamylase and acetylcholinesterase. Additionally, the detection can be accomplished by colorimetric methods that employ a chromogenic substrate for the reporter enzyme. Detection may also be accomplished by visual comparison of the extent of enzymatic reaction of a substrate in comparison with similarly prepared standards.

[0471] Detection may also be accomplished using any of a variety of other immunoassays. For example, by radioactively labeling the antibodies or antibody fragments, it is possible to detect polypeptides through the use of a radioimmunoassay (RIA) (see, for example, Weintraub, B., Principles of Radioimmunoassays, Seventh Training Course on Radioligand Assay Techniques, The Endocrine Society, March, 1986, which is incorporated by reference herein). The radioactive isotope can be detected by means including, but not limited to, a gamma counter, a scintillation counter, or autoradiography.

[0472] It is also possible to label the antibody with a fluorescent compound. When the fluorescently labeled antibody is exposed to light of the proper wave length, its presence can then be detected due to fluorescence. Among the most commonly used fluorescent labeling compounds are fluorescein isothiocyanate, rhodamine, phycoerythrin, phycocyanin, allophycocyanin, ophthaldehyde and fluorescamine.

[0473] The antibody can also be detectably labeled using fluorescence emitting metals such as ¹⁵²Eu, or others of the lanthanide series. These metals can be attached to the antibody using such metal chelating groups as diethylenetriaminepentacetic acid (DTPA) or ethylenediaminetetraacetic acid (EDTA).

[0474] The antibody also can be detectably labeled by coupling it to a chemiluminescent compound. The presence of the chemiluminescent-tagged antibody is then determined by detecting the presence of luminescence that arises during the course of a chemical reaction. Examples of particularly useful chemiluminescent labeling compounds are luminol, isoluminol, theromatic acridinium ester, imidazole, acridinium salt, and oxalate ester.

[0475] Likewise, a bioluminescent compound may be used to label the antibody of the present invention. Bioluminescence is a type of chemiluminescence found in biological systems in, which a catalytic protein increases the efficiency of the chemiluminescent reaction. The presence of a bioluminescent protein is determined by detecting the presence of luminescence. Important bioluminescent compounds for purposes of labeling are luciferin, luciferase and aequorin.

Methods for Detecting Diseases

[0476] In general, a disease may be detected in a patient based on the presence of one or more proteins of the invention and/or polynucleotides encoding such proteins in a biological sample (for example, blood, sera, urine, and/or tumor biopsies) obtained from the patient. In other words, such proteins may be used as markers to indicate the presence or absence of a disease or disorder, including cancer and/or as described elsewhere herein. In addition, such proteins may be useful for the detection of other diseases and cancers. The binding agents provided herein generally permit detection of the level of antigen that binds to the agent in the biological sample. Polynucleotide primers and probes may be used to detect the level of mRNA encoding polypeptides of the invention, which is also indicative of the presence or absence of a disease or disorder, including cancer. In general, polypeptides of the invention should be present at a level that is at least three fold higher in diseased tissue than in normal tissue.

[0477] There are a variety of assay formats known to those of ordinary skill in the art for using a binding agent to detect polypeptide markers in a sample. See, e.g., Harlow and Lane, supra. In general, the presence or absence of a disease in a patient may be determined by (a) contacting a biological sample obtained from a patient with a binding agent; (b) detecting in the sample a level of polypeptide that binds to the binding agent; and (c) comparing the level of polypeptide with a predetermined cut-off value.

[0478] In a preferred embodiment, the assay involves the use of a binding agent(s) immobilized on a solid support to bind to and remove the polypeptide of the invention from the remainder of the sample. The bound polypeptide may then be detected using a detection reagent that contains a reporter group and specifically binds to the binding agent/polypeptide complex. Such detection reagents may comprise, for example, a binding agent that specifically binds to the polypeptide or an antibody or other agent that specifically binds to the binding agent, such as an anti-immunoglobulin, protein G, protein A or a lectin. Alternatively, a competitive assay may be utilized, in which a polypeptide is labeled with a reporter group and allowed to bind to the immobilized binding agent after incubation of the binding agent with the sample. The extent to which components of the sample inhibit the binding of the labeled polypeptide to the binding agent is indicative of the reactivity of the sample with the immobilized binding agent. Suitable polypeptides for use within such assays include polypeptides of the invention and portions thereof, or antibodies, to which the binding agent binds, as described above.

[0479] The solid support may be any material known to those of skill in the art to which polypeptides of the invention may be attached. For example, the solid support may be a test well in a microtiter plate or a nitrocellulose or other suitable membrane. Alternatively, the support may be a bead or disc, such as glass fiberglass, latex or a plastic material such as polystyrene or polyvinylchloride. The support may also be a magnetic particle or a fiber optic sensor, such as those disclosed, for example, in U.S. Pat. No. 5,359,681. The binding agent may be immobilized on the solid support using a variety of techniques known to those of skill in the art, which are amply described in the patent and scientific literature. In the context of the present invention, the term “immobilization” refers to both noncovalent association, such as adsorption, and covalent attachment (which may be a direct linkage between the agent and functional groups on the support or may be a linkage by way of a cross-linking agent). Immobilization by adsorption to a well in a microtiter plate or to a membrane is preferred. In such cases, adsorption may be achieved by contacting the binding agent, in a suitable buffer, with the solid support for the suitable amount of time. The contact time varies with temperature, but is typically between about 1 hour and about 1 day. In general, contacting a well of plastic microtiter plate (such as polystyrene or polyvinylchloride) with an amount of binding agent ranging from about 10 ng to about 10 ug, and preferably about 100 ng to about 1 ug, is sufficient to immobilize an adequate amount of binding agent.

[0480] Covalent attachment of binding agent to a solid support may generally be achieved by first reacting the support with a bifunctional reagent that will react with both the support and a functional group, such as a hydroxyl or amino group, on the binding agent. For example, the binding agent may be covalently attached to supports having an appropriate polymer coating using benzoquinone or by condensation of an aldehyde group on the support with an amine and an active hydrogen on the binding partner (see, e.g., Pierce Immunotechnology Catalog and Handbook, 1991, at A12-A13).

Gene Therapy Methods

[0481] Also encompassed by the invention are gene therapy methods for treating or preventing disorders, diseases and conditions. The gene therapy methods relate to the introduction of nucleic acid (DNA, RNA and antisense DNA or RNA) sequences into an animal to achieve expression of the polypeptide of the present invention. This method requires a polynucleotide that codes for a polypeptide of the present invention operatively linked to a promoter and any other genetic elements necessary for the expression of the polypeptide by the target tissue. Such gene therapy and delivery techniques are known in the art, see, for example, WO90/11092, which is herein incorporated by reference.

[0482] Thus, for example, cells from a patient may be engineered with a polynucleotide (DNA or RNA) comprising a promoter operably linked to a polynucleotide of the present invention ex vivo, with the engineered cells then being provided to a patient to be treated with the polypeptide of the present invention. Such methods are well-known in the art. For example, see Belldegrun, A., et al., J. Natl. Cancer Inst. 85: 207-216 (1993); Ferrantini, M. et al., Cancer Research 53: 1107-1112 (1993); Ferrantini, M. et al., J. Immunology 153: 4604-4615 (1994); Kaido, T., et al., Int. J. Cancer 60: 221-229 (1995); Ogura, H., et al., Cancer Research 50: 5102-5106 (1990); Santodonato, L., et al., Human Gene Therapy 7:1-10 (1996); Santodonato, L., et al., Gene Therapy 4:1246-1255 (1997); and Zhang, J.-F. et al., Cancer Gene Therapy 3: 31-38 (1996)), which are herein incorporated by reference. In one embodiment, the cells thatare engineered are arterial cells. The arterial cells may be reintroduced into the patient through direct injection to the artery, the tissues surrounding the artery, or through catheter injection.

[0483] As discussed in more detail below, the polynucleotide constructs can be delivered by any method that delivers injectable materials to the cells of an animal, such as, injection into the interstitial space of tissues (heart, muscle, skin, lung, liver, and the like). The polynucleotide constructs may be delivered in a pharmaceutically acceptable liquid or aqueous carrier.

[0484] In one embodiment, the polynucleotide of the present invention is delivered as a naked polynucleotide. The term “naked” polynucleotide, DNA or RNA refers to sequences that are free from any delivery vehicle that acts to assist, promote or facilitate entry into the cell, including viral sequences, viral particles, liposome formulations, lipofectin or precipitating agents and the like. However, the polynucleotide of the present invention can also be delivered in liposome formulations and lipofectin formulations and the like can be prepared by methods well known to those skilled in the art. Such methods are described, for example, in U.S. Pat. Nos. 5,593,972, 5,589,466, and 5,580,859, which are herein incorporated by reference.

[0485] The polynucleotide vector constructs used in the gene therapy method are preferably constructs that will not integrate into the host genome nor will they contain sequences that allow for replication. Appropriate vectors include pWLNEO, pSV2CAT, pOG44, pXT1 and pSG available from Stratagene; pSVK3, pBPV, pMSG and pSVL available from Pharmacia; and pEF1/V5, pcDNA3.1, and pRc/CMV2 available from Invitrogen. Other suitable vectors will be readily apparent to the skilled artisan.

[0486] Any strong promoter known to those skilled in the art can be used for driving the expression of the polynucleotide sequence. Suitable promoters include adenoviral promoters, such as the adenoviral major late promoter; or heterologous promoters, such as the cytomegalovirus (CMV) promoter; the respiratory syncytial virus (RSV) promoter; inducible promoters, such as the MMT promoter, the metallothionein promoter; heat shock promoters; the albumin promoter; the ApoAI promoter; human globin promoters; viral thymidine kinase promoters, such as the Herpes Simplex thymidine kinase promoter; retroviral LTRs; the b-actin promoter; and human growth hormone promoters. The promoter also may be the native promoter for the polynucleotide of the present invention.

[0487] Unlike other gene therapy techniques, one major advantage of introducing naked nucleic acid sequences into target cells is the transitory nature of the polynucleotide synthesis in the cells. Studies have shown that non-replicating DNA sequences can be introduced into cells to provide production of the desired polypeptide for periods of up to six months.

[0488] The polynucleotide construct can be delivered to the interstitial space of tissues within the an animal, including of muscle, skin, brain, lung, liver, spleen, bone marrow, thymus, heart, lymph, blood, bone, cartilage, pancreas, kidney, gall bladder, stomach, intestine, testis, ovary, uterus, rectum, nervous system, eye, gland, and connective tissue. Interstitial space of the tissues comprises the intercellular, fluid, mucopolysaccharide matrix among the reticular fibers of organ tissues, elastic fibers in the walls of vessels or chambers, collagen fibers of fibrous tissues, or that same matrix within connective tissue ensheathing muscle cells or in the lacunae of bone. It is similarly the space occupied by the plasma of the circulation and the lymph fluid of the lymphatic channels. Delivery to the interstitial space of muscle tissue is preferred for the reasons discussed below. They may be conveniently delivered by injection into the tissues comprising these cells. They are preferably delivered to and expressed in persistent, non-dividing cells that are differentiated, although delivery and expression may be achieved in non-differentiated or less completely differentiated cells, such as, for example, stem cells of blood or skin fibroblasts. In vivo muscle cells are particularly competent in their ability to take up and express polynucleotides.

[0489] For the naked nucleic acid sequence injection, an effective dosage amount of DNA or RNA will be in the range of from about 0.05 mg/kg body weight to about 50 mg/kg body weight. Preferably the dosage will be from about 0.005 mg/kg to about 20 mg/kg and more preferably from about 0.05 mg/kg to about 5 mg/kg. Of course, as the artisan of ordinary skill will appreciate, this dosage will vary according to the tissue site of injection. The appropriate and effective dosage of nucleic acid sequence can readily be determined by those of ordinary skill in the art and may depend on the condition being treated and the route of administration.

[0490] The preferred route of administration is by the parenteral route of injection into the interstitial space of tissues. However, other parenteral routes may also be used, such as, inhalation of an aerosol formulation particularly for delivery to lungs or bronchial tissues, throat or mucous membranes of the nose. In addition, naked DNA constructs can be delivered to arteries during angioplasty by the catheter used in the procedure.

[0491] The naked polynucleotides are delivered by any method known in the art, including, but not limited to, direct needle injection at the delivery site, intravenous injection, topical administration, catheter infusion, and so-called “gene guns”. These delivery methods are known in the art.

[0492] The constructs may also be delivered with delivery vehicles such as viral sequences, viral particles, liposome formulations, lipofectin, precipitating agents, etc. Such methods of delivery are known in the art.

[0493] In certain embodiments, the polynucleotide constructs are complexed in a liposome preparation. Liposomal preparations for use in the instant invention include cationic (positively charged), anionic (negatively charged) and neutral preparations. However, cationic liposomes are particularly preferred because a tight charge complex can be formed between the cationic liposome and the polyanionic nucleic acid. Cationic liposomes have been shown to mediate intracellular delivery of plasmid DNA (Feigner et al., Proc. Natl. Acad. Sci. USA (1987) 84:7413-7416, which is herein incorporated by reference); mRNA (Malone et al., Proc. Natl. Acad. Sci. USA (1989) 86:6077-6081, which is herein incorporated by reference); and purified transcription factors (Debs et al., J. Biol. Chem. (1990) 265:10189-10192, which is herein incorporated by reference), in functional form.

[0494] Cationic liposomes are readily available. For example, N[1-2,3-dioleyloxy)propyl]-N,N,N-triethylammonium (DOTMA) liposomes are particularly useful and are available under the trademark Lipofectin, from GIBCO BRL, Grand Island, N.Y. (See, also, Feigner et al., Proc. Natl Acad. Sci. USA (1987) 84:7413-7416, which is herein incorporated by reference). Other commercially available liposomes include transfectace (DDAB/DOPE) and DOTAP/DOPE (Boehringer).

[0495] Other cationic liposomes can be prepared from readily available materials using techniques well known in the art. See, e.g. PCT Publication No. WO 90/11092 (which is herein incorporated by reference) for a description of the synthesis of DOTAP (1,2-bis(oleoyloxy)-3-(trimethylammonio)propane) liposomes. Preparation of DOTMA liposomes is explained in the literature, see, e.g., P. Feigner et al., Proc. Natl. Acad. Sci. USA 84:7413-7417, which is herein incorporated by reference. Similar methods can be used to prepare liposomes from other cationic lipid materials.

[0496] Similarly, anionic and neutral liposomes are readily available, such as from Avanti Polar Lipids (Birmingham, Ala.), or can be easily prepared using readily available materials. Such materials include phosphatidyl, choline, cholesterol, phosphatidyl ethanolamine, dioleoylphosphatidyl choline (DOPC), dioleoylphosphatidyl glycerol (DOPG), dioleoylphoshatidyl ethanolamine (DOPE), among others. These materials can also be mixed with the DOTMA and DOTAP starting materials in appropriate ratios. Methods for making liposomes using these materials are well known in the art.

[0497] For example, commercially dioleoylphosphatidyl choline (DOPC), dioleoylphosphatidyl glycerol (DOPG), and dioleoylphosphatidyl ethanolamine (DOPE) can be used in various combinations to make conventional liposomes, with or without the addition of cholesterol. Thus, for example, DOPG/DOPC vesicles can be prepared by drying 50 mg each of DOPG and DOPC under a stream of nitrogen gas into a sonication vial. The sample is placed under a vacuum pump overnight and is hydrated the following day with deionized water. The sample is then sonicated for 2 hours in a capped vial, using a Heat Systems model 350 sonicator equipped with an inverted cup (bath type) probe at the maximum setting while the bath is circulated at 15EC. Alternatively, negatively charged vesicles can be prepared without sonication to produce multilamellar vesicles or by extrusion through nucleopore membranes to produce unilamellar vesicles of discrete size. Other methods are known and available to those of skill in the art.

[0498] The liposomes can comprise multilamellar vesicles (MLVs), small unilamellar vesicles (SUVs), or large unilamellar vesicles (LUVs), with SUVs being preferred. The various liposome-nucleic acid complexes are prepared using methods well known in the art. See, e.g., Straubinger et al., Methods of Immunology (1983), 101:512-527, which is herein incorporated by reference. For example, MLVs containing nucleic acid can be prepared by depositing a thin film of phospholipid on the walls of a glass tube and subsequently hydrating with a solution of the material to be encapsulated. SUVs are prepared by extended sonication of MLVs to produce a homogeneous population of unilamellar liposomes. The material to be entrapped is added to a suspension of preformed MLVs and then sonicated. When using liposomes containing cationic lipids, the dried lipid film is resuspended in an appropriate solution such as sterile water or an isotonic buffer solution such as 10 mM Tris/NaCl, sonicated, and then the preformed liposomes are mixed directly with the DNA. The liposome and DNA form a very stable complex due to binding of the positively charged liposomes to the cationic DNA. SUVs find use with small nucleic acid fragments. LUVs are prepared by a number of methods, well known in the art. Commonly used methods include Ca²⁺-EDTA chelation (Papahadjopoulos et al., Biochim. Biophys. Acta (1975) 394:483; Wilson et al., Cell 17:77 (1979)); ether injection (Deamer, D. and Bangham, A., Biochim. Biophys. Acta 443:629 (1976); Ostro et al., Biochem. Biophys. Res. Commun. 76:836 (1977); Fraley et al., Proc. Natl. Acad. Sci. USA 76:3348 (1979)); detergent dialysis (Enoch, H. and Strittmatter, P., Proc. Natl. Acad. Sci. USA 76:145 (1979)); and reverse-phase evaporation (REV) (Fraley et al., J. Biol. Chem. 255:10431 (1980); Szoka, F. and Papahadjopoulos, D., Proc. Natl. Acad. Sci. USA 75:145 (1978); Schaefer-Ridder et al., Science 215:166 (1982)), which are herein incorporated by reference.

[0499] Generally, the ratio of DNA to liposomes will be from about 10:1 to about 1:10. Preferably, the ration will be from about 5:1 to about 1:5. More preferably, the ration will be about 3:1 to about 1:3. Still more preferably, the ratio will be about 1:1.

[0500] U.S. Pat. No. 5,676,954 (which is herein incorporated by reference) reports on the injection of genetic material, complexed with cationic liposomes carriers, into mice. U.S. Pat. Nos. 4,897,355, 4,946,787, 5,049,386, 5,459,127, 5,589,466, 5,693,622, 5,580,859, 5,703,055, and international publication no. WO 94/9469 (which are herein incorporated by reference) provide cationic lipids for use in transfecting DNA into cells and mammals. U.S. Pat. Nos. 5,589,466, 5,693,622, 5,580,859, 5,703,055, and international publication no. WO 94/9469 provides methods for delivering DNA-cationic lipid complexes to mammals.

[0501] In certain embodiments, cells are engineered, ex vivo or in vivo, using a retroviral particle containing RNA that comprises a sequence encoding a polypeptide of the present invention. Retroviruses from which the retroviral plasmid vectors may be derived include, but are not limited to, Moloney Murine Leukemia Virus, spleen necrosis virus, Rous sarcoma Virus, Harvey Sarcoma Virus, avian leukosis virus, gibbon ape leukemia virus, human immunodeficiency virus, Myeloproliferative Sarcoma Virus, and mammary tumor virus.

[0502] The retroviral plasmid vector is employed to transduce packaging cell lines to form producer cell lines. Examples of packaging cells which may be transfected include, but are not limited to, the PE501, PA317, R-2, R-AM, PA12, T19-14X, VT-19-17-H2, RCRE, RCRIP, GP+E-86, GP+envAm12, and DAN cell lines as described in Miller, Human Gene Therapy 1:5-14 (1990), which is incorporated herein by reference in its entirety. The vector may transduce the packaging cells through any means known in the art. Such means include, but are not limited to, electroporation, the use of liposomes, and CaPO₄ precipitation. In one alternative, the retroviral plasmid vector may be encapsulated into a liposome, or coupled to a lipid, and then administered to a host.

[0503] The producer cell line generates infectious retroviral vector particles that include polynucleotide encoding a polypeptide of the present invention. Such retroviral vector particles then may be employed, to transduce eukaryotic cells, either in vitro or in vivo. The transduced eukaryotic cells will express a polypeptide of the present invention.

[0504] In certain other embodiments, cells are engineered, ex vivo or in vivo, with polynucleotide contained in an adenovirus vector. Adenovirus can be manipulated such that it encodes and expresses a polypeptide of the present invention, and at the same time is inactivated in terms of its ability to replicate in a normal lytic viral life cycle. Adenovirus expression is achieved without integration of the viral DNA into the host cell chromosome, thereby alleviating concerns about insertional mutagenesis. Furthermore, adenoviruses have been used as live enteric vaccines for many years with an excellent safety profile (Schwartz et al. Am. Rev. Respir. Dis. 109:233-238 (1974)). Finally, adenovirus mediated gene transfer has been demonstrated in a number of instances including transfer of alpha-1-antitrypsin and CFTR to the lungs of cotton rats (Rosenfeld, M. A. et al. (1991) Science 252:431-434; Rosenfeld et al., (1992) Cell 68:143-155). Furthermore, extensive studies to attempt to establish adenovirus as a causative agent in human cancer were uniformly negative (Green, M. et al. (1979) Proc. Natl. Acad. Sci. USA 76:6606).

[0505] Suitable adenoviral vectors useful in the present invention are described, for example, in Kozarsky and Wilson, Curr. Opin. Genet. Devel. 3:499-503 (1993); Rosenfeld et al., Cell 68:143-155 (1992); Engelhardt et al., Human Genet. Ther. 4:759-769 (1993); Yang et al., Nature Genet. 7:362-369 (1994); Wilson et al., Nature 365:691-692 (1993); and U.S. Pat. No. 5,652,224, which are herein incorporated by reference. For example, the adenovirus vector Ad2 is useful and can be grown in human 293 cells. These cells contain the E1 region of adenovirus and constitutively express Ela and Elb, which complement the defective adenoviruses by providing the products of the genes deleted from the vector. In addition to Ad2, other varieties of adenovirus (e.g., Ad3, Ad5, and Ad7) are also useful in the present invention.

[0506] Preferably, the adenoviruses used in the present invention are replication deficient. Replication deficient adenoviruses require the aid of a helper virus and/or packaging cell line to form infectious particles. The resulting virus is capable of infecting cells and can express a polynucleotide of interest that is operably linked to a promoter, but cannot replicate in most cells. Replication deficient adenoviruses may be deleted in one or more of all or a portion of the following genes: E1a, E1b, E3, E4, E2a, or L1 through L5.

[0507] In certain other embodiments, the cells are engineered, ex vivo or in vivo, using an adeno-associated virus (AAV). AAVs are naturally occurring defective viruses that require helper viruses to produce infectious particles (Muzyczka, N., Curr. Topics in Microbiol. Immunol. 158:97 (1992)). It is also one of the few viruses that may integrate its DNA into non-dividing cells. Vectors containing as little as 300 base pairs of AAV can be packaged and can integrate, but space for exogenous DNA is limited to about 4.5 kb. Methods for producing and using such AAVs are known in the art. See, for example, U.S. Pat. Nos. 5,139,941, 5,173,414, 5,354,678, 5,436,146, 5,474,935, 5,478,745, and 5,589,377.

[0508] For example, an appropriate AAV vector for use in the present invention will include all the sequences necessary for DNA replication, encapsidation, and host-cell integration. The polynucleotide construct is inserted into the AAV vector using standard cloning methods, such as those found in Sambrook et al., Molecular Cloning: A Laboratory Manual, Cold Spring Harbor Press (1989). The recombinant AAV vector is then transfected into packaging cells which are infected with a helper virus, using any standard technique, including lipofection, electroporation, calcium phosphate precipitation, etc. Appropriate helper viruses include adenoviruses, cytomegaloviruses, vaccinia viruses, or herpes viruses. Once the packaging cells are transfected and infected, they will produce infectious AAV viral particles that contain the polynucleotide construct. These viral particles are then used to transduce eukaryotic cells, either ex vivo or in vivo. The transduced cells will contain the polynucleotide construct integrated into its genome, and will express a polypeptide of the invention.

[0509] Another method of gene therapy involves operably associating heterologous control regions and endogenous polynucleotide sequences (e.g. encoding a polypeptide of the present invention) via homologous recombination (see, e.g., U.S. Pat. No. 5,641,670, issued Jun. 24, 1997; International Publication No. WO 96/29411, published Sep. 26, 1996; International Publication No. WO 94/12650, published Aug. 4, 1994; Koller et al., Proc. Natl. Acad. Sci. USA 86:8932-8935 (1989); and Zijlstra et al., Nature 342:435-438 (1989), which are herein encorporated by reference. This method involves the activation of a gene which is present in the target cells, but which is not normally expressed in the cells, or is expressed at a lower level than desired.

[0510] Polynucleotide constructs are made, using standard techniques known in the art, which contain the promoter with targeting sequences flanking the promoter. Suitable promoters are described herein. The targeting sequence is sufficiently complementary to an endogenous sequence to permit homologous recombination of the promoter-targeting sequence with the endogenous sequence. The targeting sequence will be sufficiently near the 5′ end of the desired endogenous polynucleotide sequence so the promoter will be operably linked to the endogenous sequence upon homologous recombination.

[0511] The promoter and the targeting sequences can be amplified using PCR. Preferably, the amplified promoter contains distinct restriction enzyme sites on the 5′ and 3′ ends. Preferably, the 3′ end of the first targeting sequence contains the same restriction enzyme site as the 5′ end of the amplified promoter and the 5′ end of the second targeting sequence contains the same restriction site as the 3′ end of the amplified promoter. The amplified promoter and targeting sequences are digested and ligated together.

[0512] The promoter-targeting sequence construct is delivered to the cells, either as naked polynucleotide, or in conjunction with transfection-facilitating agents, such as liposomes, viral sequences, viral particles, whole viruses, lipofection, precipitating agents, etc., described in more detail above. The P promoter-targeting sequence can be delivered by any method, included direct needle injection, intravenous injection, topical administration, catheter infusion, particle accelerators, etc. The methods are described in more detail below.

[0513] The promoter-targeting sequence construct is taken up by cells. Homologous recombination between the construct and the endogenous sequence takes place, such that an endogenous sequence is placed under the control of the promoter. The promoter then drives the expression of the endogenous sequence.

[0514] The polynucleotide encoding a polypeptide of the present invention may contain a secretory signal sequence that facilitates secretion of the protein. Typically, the signal sequence is positioned in the coding region of the polynucleotide to be expressed towards or at the 5′ end of the coding region. The signal sequence may be homologous or heterologous to the polynucleotide of interest and may be homologous or heterologous to the cells to be transfected. Additionally, the signal sequence may be chemically synthesized using methods known in the art.

[0515] Any mode of administration of any of the above-described polynucleotides constructs can be used so long as the mode results in the expression of one or more molecules in an amount sufficient to provide a therapeutic effect. This includes direct needle injection, systemic injection, catheter infusion, biolistic injectors, particle accelerators (i.e., “gene guns”), gelfoam sponge depots, other commercially available depot materials, osmotic pumps (e.g., Alza minipumps), oral or suppositorial solid (tablet or pill) pharmaceutical formulations, and decanting or topical applications during surgery. For example, direct injection of naked calcium phosphate-precipitated plasmid into rat liver and rat spleen or a protein-coated plasmid into the portal vein has resulted in gene expression of the foreign gene in the rat livers (Kaneda et al., Science 243:375 (1989)).

[0516] A preferred method of local administration is by direct injection. Preferably, a recombinant molecule of the present invention complexed with a delivery vehicle is administered by direct injection into or locally within the area of arteries. Administration of a composition locally within the area of arteries refers to injecting the composition centimeters and preferably, millimeters within arteries.

[0517] Another method of local administration is to contact a polynucleotide construct of the present invention in or around a surgical wound. For example, a patient can undergo surgery and the polynucleotide construct can be coated on the surface of tissue inside the wound or the construct can be injected into areas of tissue inside the wound.

[0518] Therapeutic compositions useful in systemic administration include recombinant molecules of the present invention complexed to a targeted delivery vehicle of the present invention. Suitable delivery vehicles for use with systemic administration comprise liposomes comprising ligands for targeting the vehicle to a particular site. In specific embodiments, suitable delivery vehicles for use with systemic administration comprise liposomes comprising polypeptides of the invention for targeting the vehicle to a particular site.

[0519] Preferred methods of systemic administration, include intravenous injection, aerosol, oral and percutaneous (topical) delivery. Intravenous injections can be performed using methods standard in the art. Aerosol delivery can also be performed using methods standard in the art (see, for example, Stribling et al., Proc. Natl. Acad. Sci. USA 189:11277-11281, 1992, which is incorporated herein by reference). Oral delivery can be performed by complexing a polynucleotide construct of the present invention to a carrier capable of withstanding degradation by digestive enzymes in the gut of an animal. Examples of such carriers include plastic capsules or tablets, such as those known in the art. Topical delivery can be performed by mixing a polynucleotide construct of the present invention with a lipophilic reagent (e.g., DMSO) that is capable of passing into the skin.

[0520] Determining an effective amount of substance to be delivered can depend upon a number of factors including, for example, the chemical structure and biological activity of the substance, the age and weight of the animal, the precise condition requiring treatment and its severity, and the route of administration. The frequency of treatments depends upon a number of factors, such as the amount of polynucleotide constructs administered per dose, as well as the health and history of the subject. The precise amount, number of doses, and timing of doses will be determined by the attending physician or veterinarian.

[0521] Therapeutic compositions of the present invention can be administered to any animal, preferably to mammals and birds. Preferred mammals include humans, dogs, cats, mice, rats, rabbits sheep, cattle, horses and pigs, with humans being particularly preferred.

Biological Activities

[0522] Polynucleotides or polypeptides, or agonists or antagonists of the present invention, can be used in assays to test for one or more biological activities. If these polynucleotides or polypeptides, or agonists or antagonists of the present invention, do exhibit activity in a particular assay, it is likely that these molecules may be involved in the diseases associated with the biological activity. Thus, the polynucleotides and polypeptides, and agonists or antagonists could be used to treat the associated disease.

[0523] Members of the secreted family of proteins are believed to be involved in biological activities associated with, for example, cellular signaling. Accordingly, compositions of the invention (including polynucleotides, polypeptides and antibodies of the invention, and fragments and variants thereof) may be used in diagnosis, prognosis, prevention and/or treatment of diseases and/or disorders associated with aberrant activity of secreted polypeptides.

[0524] In preferred embodiments, compositions of the invention (including polynucleotides, polypeptides and antibodies of the invention, and fragments and variants thereof) may be used in the diagnosis, prognosis, prevention, treatment, and/or amelioration of diseases and/or disorders relating to the immune system (e.g., allergic reactions, asthma, anaphylaxis, hypersensitivity to an antigenic molecule, rhinitis, eczema, and as described in the “Gastrointestinal Disorders”, “Respiratory Disorders”, and “Wound Healing and Epithelial Cell Proliferation” sections below).

[0525] In certain embodiments, a polypeptide of the invention, or polynucleotides, antibodies, agonists, or antagonists corresponding to that polypeptide, may be used to diagnose and/or prognosticate diseases and/or disorders associated with the tissue(s) in which the polypeptide of the invention is expressed including one, two, three, four, five, or more tissues disclosed in Table 1B.2, column 5 (Tissue Distribution Library Code).

[0526] Thus, polynucleotides, translation products and antibodies of the invention are useful in the diagnosis, detection, prevention, prognistication, and/or treatment of diseases and/or disorders associated with activities that include, but are not limited to, prohormone activation, neurotransmitter activity, cellular signaling, cellular proliferation, cellular differentiation, and cell migration.

[0527] More generally, polynucleotides, translation products and antibodies corresponding to this gene may be useful for the diagnosis, prognosis, prevention, treatment and/or amelioration of diseases and/or disorders associated with the following system or systems.

Immune Activity

[0528] Polynucleotides, polypeptides, antibodies, and/or agonists or antagonists of the present invention may be useful in preventing, diagnosing, prognosticating, treating, and/or ameliorating diseases, disorders, and/or conditions of the immune system, by, for example, activating or inhibiting the proliferation, differentiation, or mobilization (chemotaxis) of immune cells. Immune cells develop through a process called hematopoiesis, producing myeloid (platelets, red blood cells, neutrophils, and macrophages) and lymphoid (B and T lymphocytes) cells from pluripotent stem cells. The etiology of these immune diseases, disorders, and/or conditions may be genetic, somatic, such as cancer and some autoimmune diseases, acquired (e.g., by chemotherapy or toxins), or infectious. Moreover, polynucleotides, polypeptides, antibodies, and/or agonists or antagonists of the present invention can be used as a marker or detector of a particular immune system disease or disorder.

[0529] In another embodiment, a polypeptide of the invention, or polynucleotides, antibodies, agonists, or antagonists corresponding to that polypeptide, may be used to treat diseases and disorders of the immune system and/or to inhibit or enhance an immune response generated by cells associated with the tissue(s) in which the polypeptide of the invention is expressed, including one, two, three, four, five, or more tissues disclosed in Table 1B.2, column 5 (Tissue Distribution Library Code).

[0530] Polynucleotides, polypeptides, antibodies, and/or agonists or antagonists of the present invention may be useful in preventing, diagnosing, prognosticating, treating and/or ameliorating immunodeficiencies, including both congenital and acquired immunodeficiencies. Examples of B cell immunodeficiencies in which immunoglobulin levels B cell function and/or B cell numbers are decreased include: X-linked agammaglobulinemia (Bruton's disease), X-linked infantile agammaglobulinemia, X-linked immunodeficiency with hyper IgM, non X-linked immunodeficiency with hyper IgM, X-linked lymphoproliferative syndrome (XLP), agammaglobulinemia including congenital and acquired agammaglobulinemia, adult onset agammaglobulinemia, late-onset agammaglobulinemia, dysgammaglobulinemia, hypogammaglobulinemia, unspecified hypogammaglobulinemia, recessive agammaglobulinemia (Swiss type), Selective IgM deficiency, selective IgA deficiency, selective IgG subclass deficiencies, IgG subclass deficiency (with or without IgA deficiency), Ig deficiency with increased IgM, IgG and IgA deficiency with increased IgM, antibody deficiency with normal or elevated Igs, Ig heavy chain deletions, kappa chain deficiency, B cell lymphoproliferative disorder (BLPD), common variable immunodeficiency (CVID), common variable immunodeficiency (CVI) (acquired), and transient hypogammaglobulinemia of infancy.

[0531] In specific embodiments, ataxia-telangiectasia or conditions associated with ataxia-telangiectasia are detected, prevented, diagnosed, prognosticated, treated, and/or ameliorated using the polypeptides or polynucleotides of the invention, and/or agonists or antagonists thereof.

[0532] Examples of congenital immunodeficiencies in which T cell and/or B cell function and/or number is decreased include, but are not limited to: DiGeorge anomaly, severe combined immunodeficiencies (SCID) (including, but not limited to, X-linked SCID, autosomal recessive SCID, adenosine deaminase deficiency, purine nucleoside phosphorylase (PNP) deficiency, Class II MHC deficiency (Bare lymphocyte syndrome), Wiskott-Aldrich syndrome, and ataxia telangiectasia), thymic hypoplasia, third and fourth pharyngeal pouch syndrome, 22q11.2 deletion, chronic mucocutaneous candidiasis, natural killer cell deficiency (NK), idiopathic CD4+ T-lymphocytopenia, immunodeficiency with predominant T cell defect (unspecified), and unspecified immunodeficiency of cell mediated immunity.

[0533] In specific embodiments, DiGeorge anomaly or conditions associated with DiGeorge anomaly are prevented, detected, diagnosed, prognosticated, treated and/or ameliorated using polypeptides or polynucleotides of the invention, or antagonists or agonists thereof.

[0534] Other immunodeficiencies that may be prevented, detected, diagnosed, prognosticated, treated and/or ameliorated using polypeptides or polynucleotides of the invention, and/or agonists or antagonists thereof, include, but are not limited to, chronic granulomatous disease, Chediak-Higashi syndrome, myeloperoxidase deficiency, leukocyte glucose-6-phosphate dehydrogenase deficiency, X-linked lymphoproliferative syndrome (XLP), leukocyte adhesion deficiency, complement component deficiencies (including C1, C2, C3, C4, C5, C6, C7, C8 and/or C9 deficiencies), reticular dysgenesis, thymic alymphoplasia-aplasia, immunodeficiency with thymoma, severe congenital leukopenia, dysplasia with immunodeficiency, neonatal neutropenia, short limbed dwarfism, and Nezelof syndrome-combined immunodeficiency with Igs.

[0535] In a preferred embodiment, the immunodeficiencies and/or conditions associated with the immunodeficiencies recited above are prevented, detected, diagnosed, prognosticated, treated and/or ameliorated using polynucleotides, polypeptides, antibodies, and/or agonists or antagonists of the present invention.

[0536] In a preferred embodiment polynucleotides, polypeptides, antibodies, and/or agonists or antagonists of the present invention could be used as an agent to boost immunoresponsiveness among immunodeficient individuals. In specific embodiments, polynucleotides, polypeptides, antibodies, and/or agonists or antagonists of the present invention could be used as an agent to boost immunoresponsiveness among B cell and/or T cell immunodeficient individuals.

[0537] The polynucleotides, polypeptides, antibodies, and/or agonists or antagonists of the present invention may be useful in preventing, detecting, diagnosing, prognosticating, treating and/or ameliorating autoimmune disorders. Many autoimmune disorders result from inappropriate recognition of self as foreign material by immune cells. This inappropriate recognition results in an immune response leading to the destruction of the host tissue. Therefore, the administration of polynucleotides and polypeptides of the invention that can inhibit an immune response, particularly the proliferation, differentiation, or chemotaxis of T-cells, may be an effective therapy in preventing autoimmune disorders.

[0538] Autoimmune diseases or disorders that may be prevented, detected, diagnosed, prognosticated, treated, and/or ameliorated by polynucleotides, polypeptides, antibodies, and/or agonists or antagonists of the present invention include, but are not limited to, one or more of the following: systemic lupus erythematosus, rheumatoid arthritis, ankylosing spondylitis, multiple sclerosis, autoimmune thyroiditis, Hashimoto's thyroiditis, autoimmune hemolytic anemia, hemolytic anemia, thrombocytopenia, autoimmune thrombocytopenia purpura, autoimmune neonatal thrombocytopenia, idiopathic thrombocytopenia purpura, purpura (e.g., Henloch-Scoenlein purpura), autoimmunocytopenia, Goodpasture's syndrome, Pemphigus vulgaris, myasthenia gravis, Grave's disease (hyperthyroidism), and insulin-resistant diabetes mellitus.

[0539] Additional disorders that are likely to have an autoimmune component that may be prevented, detected, diagnosed, prognosticated, treated and/or ameliorated with the compositions of the invention include, but are not limited to, type II collagen-induced arthritis, antiphospholipid syndrome, dermatitis, allergic encephalomyelitis, myocarditis, relapsing polychondritis, rheumatic heart disease, neuritis, uveitis ophthalmia, polyendocrinopathies, Reiter's Disease, Stiff-Man Syndrome, autoimmune pulmonary inflammation, autism, Guillain-Barre Syndrome, insulin dependent diabetes mellitus, and autoimmune inflammatory eye disorders.

[0540] Additional disorders that are likely to have an autoimmune component that may be prevented, detected, diagnosed, prognosticated, treated and/or ameliorated with the compositions of the invention include, but are not limited to, scleroderma with anti-collagen antibodies (often characterized, e.g., by nucleolar and other nuclear antibodies), mixed connective tissue disease (often characterized, e.g., by antibodies to extractable nuclear antigens (e.g., ribonucleoprotein)), polymyositis (often characterized, e.g., by nonhistone ANA), pernicious anemia (often characterized, e.g., by antiparietal cell, microsomes, and intrinsic factor antibodies), idiopathic Addison's disease (often characterized, e.g., by humoral and cell-mediated adrenal cytotoxicity, infertility (often characterized, e.g., by antispermatozoal antibodies), glomerulonephritis (often characterized, e.g., by glomerular basement membrane antibodies or immune complexes), bullous pemphigoid (often characterized, e.g., by IgG and complement in basement membrane), Sjogren's syndrome (often characterized, e.g., by multiple tissue antibodies, and/or a specific nonhistone ANA (SS-B)), diabetes mellitus (often characterized, e.g., by cell-mediated and humoral islet cell antibodies), and adrenergic drug resistance (including adrenergic drug resistance with asthma or cystic fibrosis) (often characterized, e.g., by beta-adrenergic receptor antibodies).

[0541] Additional disorders that may have an autoimmune component that may be prevented, detected, diagnosed, prognosticated, treated and/or ameliorated with the compositions of the invention include, but are not limited to, chronic active hepatitis (often characterized, e.g., by smooth muscle antibodies), primary biliary cirrhosis (often characterized, e.g., by mitochondria antibodies), other endocrine gland failure (often characterized, e.g., by specific tissue antibodies in some cases), vitiligo (often characterized, e.g., by melanocyte antibodies), vasculitis (often characterized, e.g., by Ig and complement in vessel walls and/or low serum complement), post-MI (often characterized, e.g., by myocardial antibodies), cardiotomy syndrome (often characterized, e.g., by myocardial antibodies), urticaria (often characterized, e.g., by IgG and IgM antibodies to IgE), atopic dermatitis (often characterized, e.g., by IgG and IgM antibodies to IgE), asthma (often characterized, e.g., by IgG and IgM antibodies to IgE), and many other inflammatory, granulomatous, degenerative, and atrophic disorders.

[0542] In a preferred embodiment, the autoimmune diseases and disorders and/or conditions associated with the diseases and disorders recited above are prevented, detected, diagnosed, prognosticated, treated and/or ameliorated using for example, antagonists or agonists, polypeptides or polynucleotides, or antibodies of the present invention. In a specific preferred embodiment, rheumatoid arthritis is prevented, detected, diagnosed, prognosticated, treated and/or ameliorated using polynucleotides, polypeptides, antibodies, and/or agonists or antagonists of the present invention.

[0543] In another specific preferred embodiment, systemic lupus erythematosus is prevented, detected, diagnosed, prognosticated, treated and/or ameliorated using polynucleotides, polypeptides, antibodies, and/or agonists or antagonists of the present invention. In another specific preferred embodiment, idiopathic thrombocytopenia purpura is prevented, detected, diagnosed, prognosticated, treated and/or ameliorated using polynucleotides, polypeptides, antibodies, and/or agonists or antagonists of the present invention.

[0544] In another specific preferred embodiment IgA nephropathy is prevented, detected, diagnosed, prognosticated, treated and/or ameliorated using polynucleotides, polypeptides, antibodies, and/or agonists or antagonists of the present invention.

[0545] In a preferred embodiment, the autoimmune diseases and disorders and/or conditions associated with the diseases and disorders recited above are prevented, detected, diagnosed, prognosticated, treated and/or ameliorated using polynucleotides, polypeptides, antibodies, and/or agonists or antagonists of the present invention

[0546] In preferred embodiments, polypeptides, antibodies, polynucleotides and/or agonists or antagonists of the present invention are used as a immunosuppressive agent(s).

[0547] Polynucleotides, polypeptides, antibodies, and/or agonists or antagonists of the present invention may be useful in detecting, preventing, diagnosing, prognosticating, treating, and/or ameliorating diseases, disorders, and/or conditions of hematopoietic cells. Polynucleotides, polypeptides, antibodies, and/or agonists or antagonists of the present invention could be used to increase differentiation and proliferation of hematopoietic cells, including the pluripotent stem cells, in an effort to treat or prevent those diseases, disorders, and/or conditions associated with a decrease in certain (or many) types hematopoietic cells, including but not limited to, leukopenia, neutropenia, anemia, and thrombocytopenia. Alternatively, Polynucleotides, polypeptides, antibodies, and/or agonists or antagonists of the present invention could be used to increase differentiation and proliferation of hematopoietic cells, including the pluripotent stem cells, in an effort to treat or prevent those diseases, disorders, and/or conditions associated with an increase in certain (or many) types of hematopoietic cells, including but not limited to, histiocytosis.

[0548] Allergic reactions and conditions, such as asthma (particularly allergic asthma) or other respiratory problems, may also be detected, prevented, diagnosed, prognosticated, treated, and/or ameliorated using polypeptides, antibodies, or polynucleotides of the invention, and/or agonists or antagonists thereof. Moreover, these molecules can be used to treat, prevent, prognose, and/or diagnose anaphylaxis, hypersensitivity to an antigenic molecule, or blood group incompatibility.

[0549] Additionally, polypeptides or polynucleotides of the invention, and/or agonists or antagonists thereof, may be used to detect, prevent, diagnose, prognosticate, treat, and/or ameliorate IgE-mediated allergic reactions. Such allergic reactions include, but are not limited to, asthma, rhinitis, and eczema. In specific embodiments, polynucleotides, polypeptides, antibodies, and/or agonists or antagonists of the present invention may be used to modulate IgE concentrations in vitro or in vivo.

[0550] Moreover, polynucleotides, polypeptides, antibodies, and/or agonists or antagonists of the present invention have uses in the detection, prevention, diagnosis, prognostication, treatment, and/or amelioration of inflammatory conditions. For example, since polypeptides, antibodies, or polynucleotides of the invention, and/or agonists or antagonists of the invention may inhibit the activation, proliferation and/or differentiation of cells involved in an inflammatory response, these molecules can be used to prevent and/or treat chronic and acute inflammatory conditions. Such inflammatory conditions include, but are not limited to, for example, inflammation associated with infection (e.g., septic shock, sepsis, or systemic inflammatory response syndrome), ischemia-reperfusion injury, endotoxin lethality, complement-mediated hyperacute rejection, nephritis, cytokine or chemokine induced lung injury, inflammatory bowel disease, Crohn's disease, over production of cytokines (e.g., TNF or IL-1), respiratory disorders (e.g., asthma and allergy); gastrointestinal disorders (e.g., inflammatory bowel disease); cancers (e.g., gastric, ovarian, lung, bladder, liver, and breast); CNS disorders (e.g., multiple sclerosis; ischemic brain injury and/or stroke, traumatic brain injury, neurodegenerative disorders (e.g., Parkinson's disease and Alzheimer's disease); AIDS-related dementia; and prion disease); cardiovascular disorders (e.g., atherosclerosis, myocarditis, cardiovascular disease, and cardiopulmonary bypass complications); as well as many additional diseases, conditions, and disorders that are characterized by inflammation (e.g., hepatitis, rheumatoid arthritis, gout, trauma, pancreatitis, sarcoidosis, dermatitis, renal ischemia-reperfusion injury, Grave's disease, systemic lupus erythematosus, diabetes mellitus, and allogenic transplant rejection).

[0551] Because inflammation is a fundamental defense mechanism, inflammatory disorders can affect virtually any tissue of the body. Accordingly, polynucleotides, polypeptides, and antibodies of the invention, as well as agonists or antagonists thereof, have uses in the treatment of tissue-specific inflammatory disorders, including, but not limited to, adrenalitis, alveolitis, angiocholecystitis, appendicitis, balanitis, blepharitis, bronchitis, bursitis, carditis, cellulitis, cervicitis, cholecystitis, chorditis, cochlitis, colitis, conjunctivitis, cystitis, dermatitis, diverticulitis, encephalitis, endocarditis, esophagitis, eustachitis, fibrositis, folliculitis, gastritis, gastroenteritis, gingivitis, glossitis, hepatosplenitis, keratitis, labyrinthitis, laryngitis, lymphangitis, mastitis, media otitis, meningitis, metritis, mucitis, myocarditis, myosititis, myringitis, nephritis, neuritis, orchitis, osteochondritis, otitis, pericarditis, peritendonitis, peritonitis, pharyngitis, phlebitis, poliomyelitis, prostatitis, pulpitis, retinitis, rhinitis, salpingitis, scleritis, sclerochoroiditis, scrotitis, sinusitis, spondylitis, steatitis, stomatitis, synovitis, syringitis, tendonitis, tonsillitis, urethritis, and vaginitis.

[0552] In specific embodiments, polypeptides, antibodies, or polynucleotides of the invention, and/or agonists or antagonists thereof, are useful to detect, prevent, diagnose, prognosticate, treat, and/or ameliorate organ transplant rejections and graft-versus-host disease. Organ rejection occurs by host immune cell destruction of the transplanted tissue through an immune response. Similarly, an immune response is also involved in GVHD, but, in this case, the foreign transplanted immune cells destroy the host tissues. Polypeptides, antibodies, or polynucleotides of the invention, and/or agonists or antagonists thereof, that inhibit an immune response, particularly the activation, proliferation, differentiation, or chemotaxis of T-cells, may be an effective therapy in preventing organ rejection or GVHD. In specific embodiments, polypeptides, antibodies, or polynucleotides of the invention, and/or agonists or antagonists thereof, that inhibit an immune response, particularly the activation, proliferation, differentiation, or chemotaxis of T-cells, may be an effective therapy in preventing experimental allergic and hyperacute xenograft rejection.

[0553] In other embodiments, polypeptides, antibodies, or polynucleotides of the invention, and/or agonists or antagonists thereof, are useful to detect, prevent, diagnose, prognosticate, treat, and/or ameliorate immune complex diseases, including, but not limited to, serum sickness, post streptococcal glomerulonephritis, polyarteritis nodosa, and immune complex-induced vasculitis.

[0554] Polypeptides, antibodies, polynucleotides and/or agonists or antagonists of the invention can be used to treat, detect, and/or prevent infectious agents. For example, by increasing the immune response, particularly increasing the proliferation activation and/or differentiation of B and/or T cells, infectious diseases may be treated, detected, and/or prevented. The immune response may be increased by either enhancing an existing immune response, or by initiating a new immune response. Alternatively, polynucleotides, polypeptides, antibodies, and/or agonists or antagonists of the present invention may also directly inhibit the infectious agent (refer to section of application listing infectious agents, etc), without necessarily eliciting an immune response.

[0555] In another embodiment, polypeptides, antibodies, polynucleotides and/or agonists or antagonists of the present invention are used as a vaccine adjuvant that enhances immune responsiveness to an antigen. In a specific embodiment, polypeptides, antibodies, polynucleotides and/or agonists or antagonists of the present invention are used as an adjuvant to enhance tumor-specific immune responses.

[0556] In another specific embodiment, polypeptides, antibodies, polynucleotides and/or agonists or antagonists of the present invention are used as an adjuvant to enhance anti-viral immune responses. Anti-viral immune responses that may be enhanced using the compositions of the invention as an adjuvant, include virus and virus associated diseases or symptoms described herein or otherwise known in the art. In specific embodiments, the compositions of the invention are used as an adjuvant to enhance an immune response to a virus, disease, or symptom selected from the group consisting of: AIDS, meningitis, Dengue, EBV, and hepatitis (e.g., hepatitis B). In another specific embodiment, the compositions of the invention are used as an adjuvant to enhance an immune response to a virus, disease, or symptom selected from the group consisting of: HIV/AIDS, respiratory syncytial virus, Dengue, rotavirus, Japanese B encephalitis, influenza A and B, parainfluenza, measles, cytomegalovirus, rabies, Junin, Chikungunya, Rift Valley Fever, herpes simplex, and yellow fever.

[0557] In another specific embodiment, polypeptides, antibodies, polynucleotides and/or agonists or antagonists of the present invention are used as an adjuvant to enhance anti-bacterial or anti-fungal immune responses. Anti-bacterial or anti-fungal immune responses that may be enhanced using the compositions of the invention as an adjuvant, include bacteria or fungus and bacteria or fungus associated diseases or symptoms described herein or otherwise known in the art. In specific embodiments, the compositions of the invention are used as an adjuvant to enhance an immune response to a bacteria or fungus, disease, or symptom selected from the group consisting of: tetanus, Diphtheria, botulism, and meningitis type B.

[0558] In another specific embodiment, the compositions of the invention are used as an adjuvant to enhance an immune response to a bacteria or fungus, disease, or symptom selected from the group consisting of: Vibrio cholerae, Mycobacterium leprae, Salmonella typhi, Salmonella paratyphi, Meisseria meningitidis, Streptococcus pneumoniae, Group B streptococcus, Shigella spp., Enterotoxigenic Escherichia coli, Enterohemorrhagic E. coli, and Borrelia burgdorferi.

[0559] In another specific embodiment, polypeptides, antibodies, polynucleotides and/or agonists or antagonists of the present invention are used as an adjuvant to enhance anti-parasitic immune responses. Anti-parasitic immune responses that may be enhanced using the compositions of the invention as an adjuvant, include parasite and parasite associated diseases or symptoms described herein or otherwise known in the art. In specific embodiments, the compositions of the invention are used as an adjuvant to enhance an immune response to a parasite. In another specific embodiment, the compositions of the invention are used as an adjuvant to enhance an immune response to Plasmodium (malaria) or Leishmania.

[0560] In another specific embodiment, polypeptides, antibodies, polynucleotides and/or agonists or antagonists of the present invention may also be employed to treat infectious diseases including silicosis, sarcoidosis, and idiopathic pulmonary fibrosis; for example, by preventing the recruitment and activation of mononuclear phagocytes.

[0561] In another specific embodiment, polypeptides, antibodies, polynucleotides and/or agonists or antagonists of the present invention are used as an antigen for the generation of antibodies to inhibit or enhance immune mediated responses against polypeptides of the invention.

[0562] In one embodiment, polypeptides, antibodies, polynucleotides and/or agonists or antagonists of the present invention are administered to an animal (e.g., mouse, rat, rabbit, hamster, guinea pig, pigs, micro-pig, chicken, camel, goat, horse, cow, sheep, dog, cat, non-human primate, and human, most preferably human) to boost the immune system to produce increased quantities of one or more antibodies (e.g., IgG, IgA, IgM, and IgE), to induce higher affinity antibody production and immunoglobulin class switching (e.g., IgG, IgA, IgM, and IgE), and/or to increase an immune response.

[0563] In another specific embodiment, polypeptides, antibodies, polynucleotides and/or agonists or antagonists of the present invention are used as a stimulator of B cell responsiveness to pathogens.

[0564] In another specific embodiment, polypeptides, antibodies, polynucleotides and/or agonists or antagonists of the present invention are used as an activator of T cells.

[0565] In another specific embodiment, polypeptides, antibodies, polynucleotides and/or agonists or antagonists of the present invention are used as an agent that elevates the immune status of an individual prior to their receipt of immunosuppressive therapies.

[0566] In another specific embodiment, polypeptides, antibodies, polynucleotides and/or agonists or antagonists of the present invention are used as an agent to induce higher affinity antibodies.

[0567] In another specific embodiment, polypeptides, antibodies, polynucleotides and/or agonists or antagonists of the present invention are used as an agent to increase serum immunoglobulin concentrations.

[0568] In another specific embodiment, polypeptides, antibodies, polynucleotides and/or agonists or antagonists of the present invention are used as an agent to accelerate recovery of immunocompromised individuals.

[0569] In another specific embodiment, polypeptides, antibodies, polynucleotides and/or agonists or antagonists of the present invention are used as an agent to boost immunoresponsiveness among aged populations and/or neonates.

[0570] In another specific embodiment, polypeptides, antibodies, polynucleotides and/or agonists or antagonists of the present invention are used as an immune system enhancer prior to, during, or after bone marrow transplant and/or other transplants (e.g., allogeneic or xenogeneic organ transplantation). With respect to transplantation, compositions of the invention may be administered prior to, concomitant with, and/or after transplantation. In a specific embodiment, compositions of the invention are administered after transplantation, prior to the beginning of recovery of T-cell populations. In another specific embodiment, compositions of the invention are first administered after transplantation after the beginning of recovery of T cell populations, but prior to full recovery of B cell populations.

[0571] In another specific embodiment, polypeptides, antibodies, polynucleotides and/or agonists or antagonists of the present invention are used as an agent to boost immunoresponsiveness among individuals having an acquired loss of B cell function. Conditions resulting in an acquired loss of B cell function that may be ameliorated or treated by administering the polypeptides, antibodies, polynucleotides and/or agonists or antagonists thereof, include, but are not limited to, HIV Infection, AIDS, bone marrow transplant, and B cell chronic lymphocytic leukemia (CLL).

[0572] In another specific embodiment, polypeptides, antibodies, polynucleotides and/or agonists or antagonists of the present invention are used as an agent to boost immunoresponsiveness among individuals having a temporary immune deficiency. Conditions resulting in a temporary immune deficiency that may be ameliorated or treated by administering the polypeptides, antibodies, polynucleotides and/or agonists or antagonists thereof, include, but are not limited to, recovery from viral infections (e.g., influenza), conditions associated with malnutrition, recovery from infectious mononucleosis, or conditions associated with stress, recovery from measles, recovery from blood transfusion, and recovery from surgery.

[0573] In another specific embodiment, polypeptides, antibodies, polynucleotides and/or agonists or antagonists of the present invention are used as a regulator of antigen presentation by monocytes, dendritic cells, and/or B-cells. In one embodiment, polynucleotides, polypeptides, antibodies, and/or agonists or antagonists of the present invention enhance antigen presentation or antagonizes antigen presentation in vitro or in vivo. Moreover, in related embodiments, said enhancement or antagonism of antigen presentation may be useful as an anti-tumor treatment or to modulate the immune system.

[0574] In another specific embodiment, polypeptides, antibodies, polynucleotides and/or agonists or antagonists of the present invention are used as an agent to direct an individual's immune system towards development of a humoral response (i.e. TH2) as opposed to a TH1 cellular response.

[0575] In another specific embodiment, polypeptides, antibodies, polynucleotides and/or agonists or antagonists of the present invention are used as a means to induce tumor proliferation and thus make it more susceptible to anti-neoplastic agents. For example, multiple myeloma is a slowly dividing disease and is thus refractory to virtually all anti-neoplastic regimens. If these cells were forced to proliferate more rapidly their susceptibility profile would likely change.

[0576] In another specific embodiment, polypeptides, antibodies, polynucleotides and/or agonists or antagonists of the present invention are used as a stimulator of B cell production in pathologies such as AIDS, chronic lymphocyte disorder and/or Common Variable Immunodificiency.

[0577] In another specific embodiment, polypeptides, antibodies, polynucleotides and/or agonists or antagonists of the present invention are used as a therapy for generation and/or regeneration of lymphoid tissues following surgery, trauma or genetic defect. In another specific embodiment, polypeptides, antibodies, polynucleotides and/or agonists or antagonists of the present invention are used in the pretreatment of bone marrow samples prior to transplant.

[0578] In another specific embodiment, polypeptides, antibodies, polynucleotides and/or agonists or antagonists of the present invention are used as a gene-based therapy for genetically inherited disorders resulting in immuno-incompetence/immunodeficiency such as observed among SCID patients.

[0579] In another specific embodiment, polypeptides, antibodies, polynucleotides and/or agonists or antagonists of the present invention are used as a means of activating monocytes/macrophages to defend against parasitic diseases that effect monocytes such as Leishmania.

[0580] In another specific embodiment, polypeptides, antibodies, polynucleotides and/or agonists or antagonists of the present invention are used as a means of regulating secreted cytokines that are elicited by polypeptides of the invention.

[0581] In another embodiment, polypeptides, antibodies, polynucleotides and/or agonists or antagonists of the present invention are used in one or more of the applications decribed herein, as they may apply to veterinary medicine.

[0582] In another specific embodiment, polypeptides, antibodies, polynucleotides and/or agonists or antagonists of the present invention are used as a means of blocking various aspects of immune responses to foreign agents or self. Examples of diseases or conditions in which blocking of certain aspects of immune responses may be desired include autoimmune disorders such as lupus, and arthritis, as well as immunoresponsiveness to skin allergies, inflammation, bowel disease, injury and diseases/disorders associated with pathogens.

[0583] In another specific embodiment, polypeptides, antibodies, polynucleotides and/or agonists or antagonists of the present invention are used as a therapy for preventing the B cell proliferation and Ig secretion associated with autoimmune diseases such as idiopathic thrombocytopenic purpura, systemic lupus erythematosus and multiple sclerosis.

[0584] In another specific embodiment, polypeptides, antibodies, polynucleotides and/or agonists or antagonists of the present invention are used as a inhibitor of B and/or T cell migration in endothelial cells. This activity disrupts tissue architecture or cognate responses and is useful, for example in disrupting immune responses, and blocking sepsis.

[0585] In another specific embodiment, polypeptides, antibodies, polynucleotides and/or agonists or antagonists of the present invention are used as a therapy for chronic hypergammaglobulinemia evident in such diseases as monoclonal gammopathy of undetermined significance (MGUS), Waldenstrom's disease, related idiopathic monoclonal gammopathies, and plasmacytomas.

[0586] In another specific embodiment, polypeptides, antibodies, polynucleotides and/or agonists or antagonists of the present invention may be employed for instance to inhibit polypeptide chemotaxis and activation of macrophages and their precursors, and of neutrophils, basophils, B lymphocytes and some T-cell subsets, e.g., activated and CD8 cytotoxic T cells and natural killer cells, in certain autoimmune and chronic inflammatory and infective diseases. Examples of autoimmune diseases are described herein and include multiple sclerosis, and insulin-dependent diabetes.

[0587] The polypeptides, antibodies, polynucleotides and/or agonists or antagonists of the present invention may also be employed to treat idiopathic hyper-eosinophilic syndrome by, for example, preventing eosinophil production and migration.

[0588] In another specific embodiment, polypeptides, antibodies, polynucleotides and/or agonists or antagonists of the present invention are used to enhance or inhibit complement mediated cell lysis.

[0589] In another specific embodiment, polypeptides, antibodies, polynucleotides and/or agonists or antagonists of the present invention are used to enhance or inhibit antibody dependent cellular cytotoxicity.

[0590] In another specific embodiment, polypeptides, antibodies, polynucleotides and/or agonists or antagonists of the present invention may also be employed for treating atherosclerosis, for example, by preventing monocyte infiltration in the artery wall.

[0591] In another specific embodiment, polypeptides, antibodies, polynucleotides and/or agonists or antagonists of the present invention may be employed to treat adult respiratory distress syndrome (ARDS).

[0592] In another specific embodiment, polypeptides, antibodies, polynucleotides and/or agonists or antagonists of the present invention may be useful for stimulating wound and tissue repair, stimulating angiogenesis, and/or stimulating the repair of vascular or lymphatic diseases or disorders. Additionally, agonists and antagonists of the invention may be used to stimulate the regeneration of mucosal surfaces.

[0593] In a specific embodiment, polynucleotides or polypeptides, and/or agonists thereof are used to detect, prevent, diagnose, prognosticate, treat, and/or ameliorate a disorder characterized by primary or acquired immunodeficiency, deficient serum immunoglobulin production, recurrent infections, and/or immune system dysfunction. Moreover, polynucleotides or polypeptides, and/or agonists thereof may be used to treat or prevent infections of the joints, bones, skin, and/or parotid glands, blood-borne infections (e.g., sepsis, meningitis, septic arthritis, and/or osteomyelitis), autoimmune diseases (e.g., those disclosed herein), inflammatory disorders, and malignancies, and/or any disease or disorder or condition associated with these infections, diseases, disorders and/or malignancies) including, but not limited to, CVID, other primary immune deficiencies, HIV disease, CLL, recurrent bronchitis, sinusitis, otitis media, conjunctivitis, pneumonia, hepatitis, meningitis, herpes zoster (e.g., severe herpes zoster), and/or pneumocystis carnii. Other diseases and disorders that may be detected, prevented, diagnosed, prognosticated, treated, and/or ameliorated with polynucleotides or polypeptides, and/or agonists of the present invention include, but are not limited to, HIV infection, HTLV-BLV infection, lymphopenia, phagocyte bactericidal dysfunction anemia, thrombocytopenia, and hemoglobinuria.

[0594] In another embodiment, polynucleotides, polypeptides, antibodies, and/or agonists or antagonists of the present invention are used to treat, and/or diagnose an individual having common variable immunodeficiency disease (“CVID”; also known as “acquired agammaglobulinemia” and “acquired hypogammaglobulinemia”) or a subset of this disease.

[0595] In a specific embodiment, polynucleotides, polypeptides, antibodies, and/or agonists or antagonists of the present invention may be used to detect, prevent, diagnose, prognosticate, treat, and/or ameliorate cancers or neoplasms including immune cell or immune tissue-related cancers or neoplasms. Examples of cancers or neoplasms that may be detected, prevented, diagnosed, prognosticated, treated, and/or ameliorated by polynucleotides, polypeptides, antibodies, and/or agonists or antagonists of the present invention include, but are not limited to, acute myelogenous leukemia, chronic myelogenous leukemia, Hodgkin's disease, non-Hodgkin's lymphoma, acute lymphocytic anemia (ALL) Chronic lymphocyte leukemia, plasmacytomas, multiple myeloma, Burkitt's lymphoma, EBV-transformed diseases, and/or diseases and disorders described in the section entitled “Hyperproliferative Disorders” elsewhere herein.

[0596] In another specific embodiment, polypeptides, antibodies, polynucleotides and/or agonists or antagonists of the present invention are used as a therapy for decreasing cellular proliferation of Large B-cell Lymphomas.

[0597] In another specific embodiment, polypeptides, antibodies, polynucleotides and/or agonists or antagonists of the present invention are used as a means of decreasing the involvement of B cells and Ig associated with Chronic Myelogenous Leukemia.

[0598] In specific embodiments, the compositions of the invention are used as an agent to boost immunoresponsiveness among B cell immunodeficient individuals, such as, for example, an individual who has undergone a partial or complete splenectomy.

[0599] Antagonists of the invention include, for example, binding and/or inhibitory antibodies, antisense nucleic acids, ribozymes or soluble forms of the polypeptides of the present invention (e.g., Fc fusion protein; see, e.g., Example 9). Agonists of the invention include, for example, binding or stimulatory antibodies, and soluble forms of the polypeptides (e.g., Fc fusion proteins; see, e.g., Example 9), polypeptides, antibodies, polynucleotides and/or agonists or antagonists of the present invention may be employed in a composition with a pharmaceutically acceptable carrier, e.g., as described herein.

[0600] In another embodiment, polypeptides, antibodies, polynucleotides and/or agonists or antagonists of the present invention are administered to an animal (including, but not limited to, those listed above, and also including transgenic animals) incapable of producing functional endogenous antibody molecules or having an otherwise compromised endogenous immune system, but which is capable of producing human immunoglobulin molecules by means of a reconstituted or partially reconstituted immune system from another animal (see, e.g., published PCT Application Nos. WO98/24893, WO/9634096, WO/9633735, and WO/9110741). Administration of polypeptides, antibodies, polynucleotides and/or agonists or antagonists of the present invention to such animals is useful for the generation of monoclonal antibodies against the polypeptides, antibodies, polynucleotides and/or agonists or antagonists of the present invention.

Respiratory Disorders

[0601] Polynucleotides or polypeptides, or agonists or antagonists of the present invention may be used to detect, prevent, diagnose, prognosticate, treat, and/or ameliorate diseases and/or disorders of the respiratory system.

[0602] Diseases and disorders of the respiratory system include, but are not limited to, nasal vestibulitis, nonallergic rhinitis (e.g., acute rhinitis, chronic rhinitis, atrophic rhinitis, vasomotor rhinitis), nasal polyps, and sinusitis, juvenile angiofibromas, cancer of the nose and juvenile papillomas, vocal cord polyps, nodules (singer's nodules), contact ulcers, vocal cord paralysis, laryngoceles, pharyngitis (e.g., viral and bacterial), tonsillitis, tonsillar cellulitis, parapharyngeal abscess, laryngitis, laryngoceles, and throat cancers (e.g., cancer of the nasopharynx, tonsil cancer, larynx cancer), lung cancer (e.g., squamous cell carcinoma, small cell (oat cell) carcinoma, large cell carcinoma, and adenocarcinoma), allergic disorders (eosinophilic pneumonia, hypersensitivity pneumonitis (e.g., extrinsic allergic alveolitis, allergic interstitial pneumonitis, organic dust pneumoconiosis, allergic bronchopulmonary aspergillosis, asthma, Wegener's granulomatosis (granulomatous vasculitis), Goodpasture's syndrome)), pneumonia (e.g., bacterial pneumonia (e.g., Streptococcus pneumoniae (pneumoncoccal pneumonia), Staphylococcus aureus (staphylococcal pneumonia), Gram-negative bacterial pneumonia (caused by, e.g., Klebsiella and Pseudomas spp.), Mycoplasma pneumoniae pneumonia, Hemophilus influenzae pneumonia, Legionella pneumophila (Legionnaires' disease), and Chlamydia psittaci (Psittacosis)), and viral pneumonia (e.g., influenza, chickenpox (varicella).

[0603] Additional diseases and disorders of the respiratory system include, but are not limited to bronchiolitis, polio (poliomyelitis), croup, respiratory syncytial viral infection, mumps, erythema infectiosum (fifth disease), roseola infantum, progressive rubella panencephalitis, german measles, and subacute sclerosing panencephalitis), fungal pneumonia (e.g., Histoplasmosis, Coccidioidomycosis, Blastomycosis, fungal infections in people with severely suppressed immune systems (e.g., cryptococcosis, caused by Cryptococcus neoformans; aspergillosis, caused by Aspergillus spp.; candidiasis, caused by Candida; and mucormycosis)), Pneumocystis carinii (pneumocystis pneumonia), atypical pneumonias (e.g., Mycoplasma and Chlamydia spp.), opportunistic infection pneumonia, nosocomial pneumonia, chemical pneumonitis, and aspiration pneumonia, pleural disorders (e.g., pleurisy, pleural effusion, and pneumothorax (e.g., simple spontaneous pneumothorax, complicated spontaneous pneumothorax, tension pneumothorax)), obstructive airway diseases (e.g., asthma, chronic obstructive pulmonary disease (COPD), emphysema, chronic or acute bronchitis), occupational lung diseases (e.g., silicosis, black lung (coal workers' pneumoconiosis), asbestosis, berylliosis, occupational asthsma, byssinosis, and benign pneumoconioses), Infiltrative Lung Disease (e.g., pulmonary fibrosis (e.g., fibrosing alveolitis, usual interstitial pneumonia), idiopathic pulmonary fibrosis, desquamative interstitial pneumonia, lymphoid interstitial pneumonia, histiocytosis X (e.g., Letterer-Siwe disease, Hand-Schüller-Christian disease, eosinophilic granuloma), idiopathic pulmonary hemosiderosis, sarcoidosis and pulmonary alveolar proteinosis), Acute respiratory distress syndrome (also called, e.g., adult respiratory distress syndrome), edema, pulmonary embolism, bronchitis (e.g., viral, bacterial), bronchiectasis, atelectasis, lung abscess (caused by, e.g., Staphylococcus aureus or Legionella pneumophila), and cystic fibrosis.

Wound Healing and Epithelial Cell Proliferation

[0604] In accordance with yet a further aspect of the present invention, there is provided a process for utilizing polynucleotides or polypeptides, as well as agonists or antagonists of the present invention, for therapeutic purposes, for example, to stimulate epithelial cell proliferation and basal keratinocytes for the purpose of wound healing, and to stimulate hair follicle production and healing of dermal wounds. Polynucleotides or polypeptides, as well as agonists or antagonists of the present invention, may be clinically useful in stimulating wound healing including surgical wounds, excisional wounds, deep wounds involving damage of the dermis and epidermis, eye tissue wounds, dental tissue wounds, oral cavity wounds, diabetic ulcers, dermal ulcers, cubitus ulcers, arterial ulcers, venous stasis ulcers, burns resulting from heat exposure or chemicals, and other abnormal wound healing conditions such as uremia, malnutrition, vitamin deficiencies and complications associated with systemic treatment with steroids, radiation therapy and antineoplastic drugs and antimetabolites. Polynucleotides or polypeptides, as well as agonists or antagonists of the present invention, could be used to promote dermal reestablishment subsequent to dermal loss

[0605] Polynucleotides or polypeptides, as well as agonists or antagonists of the present invention, could be used to increase the adherence of skin grafts to a wound bed and to stimulate re-epithelialization from the wound bed. The following are types of grafts that polynucleotides or polypeptides, agonists or antagonists of the present invention, could be used to increase adherence to a wound bed: autografts, artificial skin, allografts, autodermic graft, autoepdermic grafts, avacular grafts, Blair-Brown grafts, bone graft, brephoplastic grafts, cutis graft, delayed graft, dermic graft, epidermic graft, fascia graft, full thickness graft, heterologous graft, xenograft, homologous graft, hyperplastic graft, lamellar graft, mesh graft, mucosal graft, Ollier-Thiersch graft, omenpal graft, patch graft, pedicle graft, penetrating graft, split skin graft, thick split graft. Polynucleotides or polypeptides, as well as agonists or antagonists of the present invention, can be used to promote skin strength and to improve the appearance of aged skin.

[0606] It is believed that polynucleotides or polypeptides, as well as agonists or antagonists of the present invention, will also produce changes in hepatocyte proliferation, and epithelial cell proliferation in the lung, breast, pancreas, stomach, small intestine, and large intestine. Polynucleotides or polypeptides, as well as agonists or antagonists of the present invention, could promote proliferation of epithelial cells such as sebocytes, hair follicles, hepatocytes, type II pneumocytes, mucin-producing goblet cells, and other epithelial cells and their progenitors contained within the skin, lung, liver, and gastrointestinal tract. Polynucleotides or polypeptides, agonists or antagonists of the present invention, may promote proliferation of endothelial cells, keratinocytes, and basal keratinocytes.

[0607] Polynucleotides or polypeptides, as well as agonists or antagonists of the present invention, could also be used to reduce the side effects of gut toxicity that result from radiation, chemotherapy treatments or viral infections. Polynucleotides or polypeptides, as well as agonists or antagonists of the present invention, may have a cytoprotective effect on the small intestine mucosa. Polynucleotides or polypeptides, as well as agonists or antagonists of the present invention, may also stimulate healing of mucositis (mouth ulcers) that result from chemotherapy and viral infections.

[0608] Polynucleotides or polypeptides, as well as agonists or antagonists of the present invention, could further be used in full regeneration of skin in full and partial thickness skin defects, including burns, (i.e., repopulation of hair follicles, sweat glands, and sebaceous glands), treatment of other skin defects such as psoriasis. Polynucleotides or polypeptides, as well as agonists or antagonists of the present invention, could be used to treat epidermolysis bullosa, a defect in adherence of the epidermis to the underlying dermis which results in frequent, open and painful blisters by accelerating reepithelialization of these lesions. Polynucleotides or polypeptides, as well as agonists or antagonists of the present invention, could also be used to treat gastric and doudenal ulcers and help heal by scar formation of the mucosal lining and regeneration of glandular mucosa and duodenal mucosal lining more rapidly. Inflammatory bowel diseases, such as Crohn's disease and ulcerative colitis, are diseases which result in destruction of the mucosal surface of the small or large intestine, respectively. Thus, polynucleotides or polypeptides, as well as agonists or antagonists of the present invention, could be used to promote the resurfacing of the mucosal surface to aid more rapid healing and to prevent progression of inflammatory bowel disease. Treatment with polynucleotides or polypeptides, agonists or antagonists of the present invention, is expected to have a significant effect on the production of mucus throughout the gastrointestinal tract and could be used to protect the intestinal mucosa from injurious substances that are ingested or following surgery. Polynucleotides or polypeptides, as well as agonists or antagonists of the present invention, could be used to treat diseases associate with the under expression.

[0609] Moreover, polynucleotides or polypeptides, as well as agonists or antagonists of the present invention, could be used to prevent and heal damage to the lungs due to various pathological states. Polynucleotides or polypeptides, as well as agonists or antagonists of the present invention, which could stimulate proliferation and differentiation and promote the repair of alveoli and brochiolar epithelium to prevent or treat acute or chronic lung damage. For example, emphysema, which results in the progressive loss of aveoli, and inhalation injuries, i.e., resulting from smoke inhalation and burns, that cause necrosis of the bronchiolar epithelium and alveoli could be effectively treated using polynucleotides or polypeptides, agonists or antagonists of the present invention. Also, polynucleotides or polypeptides, as well as agonists or antagonists of the present invention, could be used to stimulate the proliferation of and differentiation of type II pneumocytes, which may help treat or prevent disease such as hyaline membrane diseases, such as infant respiratory distress syndrome and bronchopulmonary displasia, in premature infants.

[0610] Polynucleotides or polypeptides, as well as agonists or antagonists of the present invention, could stimulate the proliferation and differentiation of hepatocytes and, thus, could be used to alleviate or treat liver diseases and pathologies such as fulminant liver failure caused by cirrhosis, liver damage caused by viral hepatitis and toxic substances (i.e., acetaminophen, carbon tetraholoride and other hepatotoxins known in the art).

[0611] In addition, polynucleotides or polypeptides, as well as agonists or antagonists of the present invention, could be used treat or prevent the onset of diabetes mellitus. In patients with newly diagnosed Types I and II diabetes, where some islet cell function remains, polynucleotides or polypeptides, as well as agonists or antagonists of the present invention, could be used to maintain the islet function so as to alleviate, delay or prevent permanent manifestation of the disease. Also, polynucleotides or polypeptides, as well as agonists or antagonists of the present invention, could be used as an auxiliary in islet cell transplantation to improve or promote islet cell function.

Gastrointestinal Disorders

[0612] Polynucleotides or polypeptides, or agonists or antagonists of the present invention, may be used to detect, prevent, diagnose, prognosticate, treat, and/or ameliorate gastrointestinal diseases and disorders, including inflammatory diseases and/or conditions, infections, cancers (e.g., intestinal neoplasms (carcinoid tumor of the small intestine, non-Hodgkin's lymphoma of the small intestine, small bowl lymphoma)), and ulcers, such as peptic ulcers.

[0613] Gastrointestinal disorders include dysphagia, odynophagia, inflammation of the esophagus, peptic esophagitis, gastric reflux, submucosal fibrosis and stricturing, Mallory-Weiss lesions, leiomyomas, lipomas, epidermal cancers, adeoncarcinomas, gastric retention disorders, gastroenteritis, gastric atrophy, gastric/stomach cancers, polyps of the stomach, autoimmune disorders such as pernicious anemia, pyloric stenosis, gastritis (bacterial, viral, eosinophilic, stress-induced, chronic erosive, atrophic, plasma cell, and Menetrier's), and peritoneal diseases (e.g., chyloperioneum, hemoperitoneum, mesenteric cyst, mesenteric lymphadenitis, mesenteric vascular occlusion, panniculitis, neoplasms, peritonitis, pneumoperitoneum, bubphrenic abscess).

[0614] Gastrointestinal disorders also include disorders associated with the small intestine, such as malabsorption syndromes, distension, irritable bowel syndrome, sugar intolerance, celiac disease, duodenal ulcers, duodenitis, tropical sprue, Whipple's disease, intestinal lymphangiectasia, Crohn's disease, appendicitis, obstructions of the ileum, Meckel's diverticulum, multiple diverticula, failure of complete rotation of the small and large intestine, lymphoma, and bacterial and parasitic diseases (such as Traveler's diarrhea, typhoid and paratyphoid, cholera, infection by Roundworms (Ascariasis lumbricoides), Hookworms (Ancylostoma duodenale), Threadworms (Enterobius vermicularis), Tapeworms (Taenia saginata, Echinococcus granulosus, Diphyllobothrium spp., and T. solium).

[0615] Liver diseases and/or disorders include intrahepatic cholestasis (alagille syndrome, biliary liver cirrhosis), fatty liver (alcoholic fatty liver, reye syndrome), hepatic vein thrombosis, hepatolentricular degeneration, hepatomegaly, hepatopulmonary syndrome, hepatorenal syndrome, portal hypertension (esophageal and gastric varices), liver abscess (amebic liver abscess), liver cirrhosis (alcoholic, biliary and experimental), alcoholic liver diseases (fatty liver, hepatitis, cirrhosis), parasitic (hepatic echinococcosis, fascioliasis, amebic liver abscess), jaundice (hemolytic, hepatocellular, and cholestatic), cholestasis, portal hypertension, liver enlargement, ascites, hepatitis (alcoholic hepatitis, animal hepatitis, chronic hepatitis (autoimmune, hepatitis B, hepatitis C, hepatitis D, drug induced), toxic hepatitis, viral human hepatitis (hepatitis A, hepatitis B, hepatitis C, hepatitis D, hepatitis E), Wilson's disease, granulomatous hepatitis, secondary biliary cirrhosis, hepatic encephalopathy, portal hypertension, varices, hepatic encephalopathy, primary biliary cirrhosis, primary sclerosing cholangitis, hepatocellular adenoma, hemangiomas, bile stones, liver failure (hepatic encephalopathy, acute liver failure), and liver neoplasms (angiomyolipoma, calcified liver metastases, cystic liver metastases, epithelial tumors, fibrolamellar hepatocarcinoma, focal nodular hyperplasia, hepatic adenoma, hepatobiliary cystadenoma, hepatoblastoma, hepatocellular carcinoma, hepatoma, liver cancer, liver hemangioendothelioma, mesenchymal hamartoma, mesenchymal tumors of liver, nodular regenerative hyperplasia, benign liver tumors (Hepatic cysts [Simple cysts, Polycystic liver disease, Hepatobiliary cystadenoma, Choledochal cyst], Mesenchymal tumors [Mesenchymal hamartoma, Infantile hemangioendothelioma, Hemangioma, Peliosis hepatis, Lipomas, Inflammatory pseudotumor, Miscellaneous], Epithelial tumors [Bile duct epithelium (Bile duct hamartoma, Bile duct adenoma), Hepatocyte (Adenoma, Focal nodular hyperplasia, Nodular regenerative hyperplasia)], malignant liver tumors [hepatocellular, hepatoblastoma, hepatocellular carcinoma, cholangiocellular, cholangiocarcinoma, cystadenocarcinoma, tumors of blood vessels, angiosarcoma, Karposi's sarcoma, hemangioendothelioma, other tumors, embryonal sarcoma, fibrosarcoma, leiomyosarcoma, rhabdomyosarcoma, carcinosarcoma, teratoma, carcinoid, squamous carcinoma, primary lymphoma]), peliosis hepatis, erythrohepatic porphyria, hepatic porphyria (acute intermittent porphyria, porphyria cutanea tarda), Zellweger syndrome).

[0616] Pancreatic diseases and/or disorders include acute pancreatitis, chronic pancreatitis (acute necrotizing pancreatitis, alcoholic pancreatitis), neoplasms (adenocarcinoma of the pancreas, cystadenocarcinoma, insulinoma, gastrinoma, and glucagonoma, cystic neoplasms, islet-cell tumors, pancreoblastoma), and other pancreatic diseases (e.g., cystic fibrosis, cyst (pancreatic pseudocyst, pancreatic fistula, insufficiency)).

[0617] Gallbladder diseases include gallstones (cholelithiasis and choledocholithiasis), postcholecystectomy syndrome, diverticulosis of the gallbladder, acute cholecystitis, chronic cholecystitis, bile duct tumors, and mucocele.

[0618] Diseases and/or disorders of the large intestine include antibiotic-associated colitis, diverticulitis, ulcerative colitis, acquired megacolon, abscesses, fungal and bacterial infections, anorectal disorders (e.g., fissures, hemorrhoids), colonic diseases (colitis, colonic neoplasms [colon cancer, adenomatous colon polyps (e.g., villous adenoma), colon carcinoma, colorectal cancer], colonic diverticulitis, colonic diverticulosis, megacolon [Hirschsprung disease, toxic megacolon]; sigmoid diseases [proctocolitis, sigmoin neoplasms]), constipation, Crohn's disease, diarrhea (infantile diarrhea, dysentery), duodenal diseases (duodenal neoplasms, duodenal obstruction, duodenal ulcer, duodenitis), enteritis (enterocolitis), HIV enteropathy, ileal diseases (ileal neoplasms, ileitis), immunoproliferative small intestinal disease, inflammatory bowel disease (ulcerative colitis, Crohn's disease), intestinal atresia, parasitic diseases (anisakiasis, balantidiasis, blastocystis infections, cryptosporidiosis, dientamoebiasis, amebic dysentery, giardiasis), intestinal fistula (rectal fistula), intestinal neoplasms (cecal neoplasms, colonic neoplasms, duodenal neoplasms, ileal neoplasms, intestinal polyps, jejunal neoplasms, rectal neoplasms), intestinal obstruction (afferent loop syndrome, duodenal obstruction, impacted feces, intestinal pseudo-obstruction [cecal volvulus], intussusception), intestinal perforation, intestinal polyps (colonic polyps, gardner syndrome, peutz-jeghers syndrome), jejunal diseases (jejunal neoplasms), malabsorption syndromes (blind loop syndrome, celiac disease, lactose intolerance, short bowl syndrome, tropical sprue, whipple's disease), mesenteric vascular occlusion, pneumatosis cystoides intestinalis, protein-losing enteropathies (intestinal lymphagiectasis), rectal diseases (anus diseases, fecal incontinence, hemorrhoids, proctitis, rectal fistula, rectal prolapse, rectocele), peptic ulcer (duodenal ulcer, peptic esophagitis, hemorrhage, perforation, stomach ulcer, Zollinger-Ellison syndrome), postgastrectomy syndromes (dumping syndrome), stomach diseases (e.g., achlorhydria, duodenogastric reflux (bile reflux), gastric antral vascular ectasia, gastric fistula, gastric outlet obstruction, gastritis (atrophic or hypertrophic), gastroparesis, stomach dilatation, stomach diverticulum, stomach neoplasms (gastric cancer, gastric polyps, gastric adenocarcinoma, hyperplastic gastric polyp), stomach rupture, stomach ulcer, stomach volvulus), tuberculosis, visceroptosis, vomiting (e.g., hematemesis, hyperemesis gravidarum, postoperative nausea and vomiting) and hemorrhagic colitis.

[0619] Further diseases and/or disorders of the gastrointestinal system include biliary tract diseases, such as, gastroschisis, fistula (e.g., biliary fistula, esophageal fistula, gastric fistula, intestinal fistula, pancreatic fistula), neoplasms (e.g., biliary tract neoplasms, esophageal neoplasms, such as adenocarcinoma of the esophagus, esophageal squamous cell carcinoma, gastrointestinal neoplasms, pancreatic neoplasms, such as adenocarcinoma of the pancreas, mucinous cystic neoplasm of the pancreas, pancreatic cystic neoplasms, pancreatoblastoma, and peritoneal neoplasms), esophageal disease (e.g., bullous diseases, candidiasis, glycogenic acanthosis, ulceration, barrett esophagus varices, atresia, cyst, diverticulum (e.g., Zenker's diverticulum), fistula (e.g., tracheoesophageal fistula), motility disorders (e.g., CREST syndrome, deglutition disorders, achalasia, spasm, gastroesophageal reflux), neoplasms, perforation (e.g., Boerhaave syndrome, Mallory-Weiss syndrome), stenosis, esophagitis, diaphragmatic hernia (e.g., hiatal hernia); gastrointestinal diseases, such as, gastroenteritis (e.g., cholera morbus, norwalk virus infection), hemorrhage (e.g., hematemesis, melena, peptic ulcer hemorrhage), stomach neoplasms (gastric cancer, gastric polyps, gastric adenocarcinoma, stomach cancer)), hernia (e.g., congenital diaphragmatic hernia, femoral hernia, inguinal hernia, obturator hernia, umbilical hernia, ventral hernia), and intestinal diseases (e.g., cecal diseases (appendicitis, cecal neoplasms)).

Chemotaxis

[0620] Polynucleotides or polypeptides, as well as agonists or antagonists of the present invention may have chemotaxis activity. A chemotaxic molecule attracts or mobilizes cells (e.g., monocytes, fibroblasts, neutrophils, T-cells, mast cells, eosinophils, epithelial and/or endothelial cells) to a particular site in the body, such as inflammation, infection, or site of hyperproliferation. The mobilized cells can then fight off and/or heal the particular trauma or abnormality.

[0621] Polynucleotides or polypeptides, as well as agonists or antagonists of the present invention may increase chemotaxic activity of particular cells. These chemotactic molecules can then be used to treat inflammation, infection, hyperproliferative disorders, or any immune system disorder by increasing the number of cells targeted to a particular location in the body. For example, chemotaxic molecules can be used to treat wounds and other trauma to tissues by attracting immune cells to the injured location. Chemotactic molecules of the present invention can also attract fibroblasts, which can be used to treat wounds.

[0622] It is also contemplated that polynucleotides or polypeptides, as well as agonists or antagonists of the present invention may inhibit chemotactic activity. These molecules could also be used to treat disorders. Thus, polynucleotides or polypeptides, as well as agonists or antagonists of the present invention could be used as an inhibitor of chemotaxis.

Binding Activity

[0623] A polypeptide of the present invention may be used to screen for molecules that bind to the polypeptide or for molecules to which the polypeptide binds. The binding of the polypeptide and the molecule may activate (agonist), increase, inhibit (antagonist), or decrease activity of the polypeptide or the molecule bound. Examples of such molecules include antibodies, oligonucleotides, proteins (e.g., receptors), or small molecules.

[0624] Preferably, the molecule is closely related to the natural ligand of the polypeptide, e.g., a fragment of the ligand, or a natural substrate, a ligand, a structural or functional mimetic. (See, Coligan et al., Current Protocols in Immunology 1(2):Chapter 5 (1991)). Similarly, the molecule can be closely related to the natural receptor to which the polypeptide binds, or at least, a fragment of the receptor capable of being bound by the polypeptide (e.g., active site). In either case, the molecule can be rationally designed using known techniques.

[0625] Preferably, the screening for these molecules involves producing appropriate cells which express the polypeptide. Preferred cells include cells from mammals, yeast, Drosophila, or E. coli. Cells expressing the polypeptide (or cell membrane containing the expressed polypeptide) are then preferably contacted with a test compound potentially containing the molecule to observe binding, stimulation, or inhibition of activity of either the polypeptide or the molecule.

[0626] The assay may simply test binding of a candidate compound to the polypeptide, wherein binding is detected by a label, or in an assay involving competition with a labeled competitor. Further, the assay may test whether the candidate compound results in a signal generated by binding to the polypeptide.

[0627] Alternatively, the assay can be carried out using cell-free preparations, polypeptide/molecule affixed to a solid support, chemical libraries, or natural product mixtures. The assay may also simply comprise the steps of mixing a candidate compound with a solution containing a polypeptide, measuring polypeptide/molecule activity or binding, and comparing the polypeptide/molecule activity or binding to a standard.

[0628] Preferably, an ELISA assay can measure polypeptide level or activity in a sample (e.g., biological sample) using a monoclonal or polyclonal antibody. The antibody can measure polypeptide level or activity by either binding, directly or indirectly, to the polypeptide or by competing with the polypeptide for a substrate.

[0629] Additionally, the receptor to which the polypeptide of the present invention binds can be identified by numerous methods known to those of skill in the art, for example, ligand panning and FACS sorting (Coligan, et al., Current Protocols in Immun., 1(2), Chapter 5, (1991)). For example, expression cloning is employed wherein polyadenylated RNA is prepared from a cell responsive to the polypeptides, for example, NIH3T3 cells which are known to contain multiple receptors for the FGF family proteins, and SC-3 cells, and a cDNA library created from this RNA is divided into pools and used to transfect COS cells or other cells that are not responsive to the polypeptides. Transfected cells which are grown on glass slides are exposed to the polypeptide of the present invention, after they have been labeled. The polypeptides can be labeled by a variety of means including iodination or inclusion of a recognition site for a site-specific protein kinase.

[0630] Following fixation and incubation, the slides are subjected to auto-radiographic analysis. Positive pools are identified and sub-pools are prepared and re-transfected using an iterative sub-pooling and re-screening process, eventually yielding a single clones that encodes the putative receptor.

[0631] As an alternative approach for receptor identification, the labeled polypeptides can be photoaffinity linked with cell membrane or extract preparations that express the receptor molecule. Cross-linked material is resolved by PAGE analysis and exposed to X-ray film. The labeled complex containing the receptors of the polypeptides can be excised, resolved into peptide fragments, and subjected to protein microsequencing. The amino acid sequence obtained from microsequencing would be used to design a set of degenerate oligonucleotide probes to screen a cDNA library to identify the genes encoding the putative receptors.

[0632] Moreover, the techniques of gene-shuffling, motif-shuffling, exon-shuffling, and/or codon-shuffling (collectively referred to as “DNA shuffling”) may be employed to modulate the activities of the polypeptide of the present invention thereby effectively generating agonists and antagonists of the polypeptide of the present invention. See generally, U.S. Pat. Nos. 5,605,793, 5,811,238, 5,830,721, 5,834,252, and 5,837,458, and Patten, P. A., et al., Curr. Opinion Biotechnol. 8:724-33 (1997); Harayama, S. Trends Biotechnol. 16(2):76-82 (1998); Hansson, L. O., et al., J. Mol. Biol. 287:265-76 (1999); and Lorenzo, M. M. and Blasco, R. Biotechniques 24(2):308-13 (1998); each of these patents and publications are hereby incorporated by reference). In one embodiment, alteration of polynucleotides and corresponding polypeptides may be achieved by DNA shuffling. DNA shuffling involves the assembly of two or more DNA segments into a desired molecule by homologous, or site-specific, recombination. In another embodiment, polynucleotides and corresponding polypeptides may be altered by being subjected to random mutagenesis by error-prone PCR, random nucleotide insertion or other methods prior to recombination. In another embodiment, one or more components, motifs, sections, parts, domains, fragments, etc., of the polypeptide of the present invention may be recombined with one or more components, motifs, sections, parts, domains, fragments, etc. of one or more heterologous molecules. In preferred embodiments, the heterologous molecules are family members. In further preferred embodiments, the heterologous molecule is a growth factor such as, for example, platelet-derived growth factor (PDGF), insulin-like growth factor (IGF-I), transforming growth factor (TGF)-alpha, epidermal growth factor (EGF), fibroblast growth factor (FGF), TGF-beta, bone morphogenetic protein (BMP)-2, BMP-4, BMP-5, BMP-6, BMP-7, activins A and B, decapentaplegic (dpp), 60A, OP-2, dorsalin, growth differentiation factors (GDFs), nodal, MIS, inhibin-alpha, TGF-beta1, TGF-beta2, TGF-beta3, TGF-beta5, and glial-derived neurotrophic factor (GDNF).

[0633] Other preferred fragments are biologically active fragments of the polypeptide of the present invention. Biologically active fragments are those exhibiting activity similar, but not necessarily identical, to an activity of the polypeptide of the present invention. The biological activity of the fragments may include an improved desired activity, or a decreased undesirable activity.

[0634] Additionally, this invention provides a method of screening compounds to identify those which modulate the action of the polypeptide of the present invention. An example of such an assay comprises combining a mammalian fibroblast cell, a the polypeptide of the present invention, the compound to be screened and ³[H] thymidine under cell culture conditions where the fibroblast cell would normally proliferate. A control assay may be performed in the absence of the compound to be screened and compared to the amount of fibroblast proliferation in the presence of the compound to determine if the compound stimulates proliferation by determining the uptake of ³[H] thymidine in each case. The amount of fibroblast cell proliferation is measured by liquid scintillation chromatography which measures the incorporation of ³[H] thymidine. Both agonist and antagonist compounds may be identified by this procedure.

[0635] In another method, a mammalian cell or membrane preparation expressing a receptor for a polypeptide of the present invention is incubated with a labeled polypeptide of the present invention in the presence of the compound. The ability of the compound to enhance or block this interaction could then be measured. Alternatively, the response of a known second messenger system following interaction of a compound to be screened and the receptor is measured and the ability of the compound to bind to the receptor and elicit a second messenger response is measured to determine if the compound is a potential agonist or antagonist. Such second messenger systems include but are not limited to, cAMP guanylate cyclase, ion channels or phosphoinositide hydrolysis.

[0636] All of these above assays can be used as diagnostic or prognostic markers. The molecules discovered using these assays can be used to treat disease or to bring about a particular result in a patient (e.g., blood vessel growth) by activating or inhibiting the polypeptide/molecule. Moreover, the assays can discover agents which may inhibit or enhance the production of the polypeptides of the invention from suitably manipulated cells or tissues.

[0637] Therefore, the invention includes a method of identifying compounds which bind to a polypeptide of the invention comprising the steps of: (a) incubating a candidate binding compound with a polypeptide of the present invention; and (b) determining if binding has occurred. Moreover, the invention includes a method of identifying agonists/antagonists comprising the steps of: (a) incubating a candidate compound with a polypeptide of the present invention, (b) assaying a biological activity, and (b) determining if a biological activity of the polypeptide has been altered.

Targeted Delivery

[0638] In another embodiment, the invention provides a method of delivering compositions to targeted cells expressing a receptor for a polypeptide of the invention, or cells expressing a cell bound form of a polypeptide of the invention.

[0639] As discussed herein, polypeptides or antibodies of the invention may be associated with heterologous polypeptides, heterologous nucleic acids, toxins, or prodrugs via hydrophobic, hydrophilic, ionic and/or covalent interactions. In one embodiment, the invention provides a method for the specific delivery of compositions of the invention to cells by administering polypeptides of the invention (including antibodies) that are associated with heterologous polypeptides or nucleic acids. In one example, the invention provides a method for delivering a therapeutic protein into the targeted cell. In another example, the invention provides a method for delivering a single stranded nucleic acid (e.g., antisense or ribozymes) or double stranded nucleic acid (e.g., DNA that can integrate into the cell's genome or replicate episomally and that can be transcribed) into the targeted cell.

[0640] In another embodiment, the invention provides a method for the specific destruction of cells (e.g., the destruction of tumor cells) by administering polypeptides of the invention (e.g., polypeptides of the invention or antibodies of the invention) in association with toxins or cytotoxic prodrugs.

[0641] By “toxin” is meant compounds that bind and activate endogenous cytotoxic effector systems, radioisotopes, holotoxins, modified toxins, catalytic subunits of toxins, or any molecules or enzymes not normally present in or on the surface of a cell that under defined conditions cause the cell's death. Toxins that may be used according to the methods of the invention include, but are not limited to, radioisotopes known in the art, compounds such as, for example, antibodies (or complement fixing containing portions thereof) that bind an inherent or induced endogenous cytotoxic effector system, thymidine kinase, endonuclease, RNAse, alpha toxin, ricin, abrin, Pseudomonas exotoxin A, diphtheria toxin, saporin, momordin, gelonin, pokeweed antiviral protein, alpha-sarcin and cholera toxin. By “cytotoxic prodrug” is meant a non-toxic compound that is converted by an enzyme, normally present in the cell, into a cytotoxic compound. Cytotoxic prodrugs that may be used according to the methods of the invention include, but are not limited to, glutamyl derivatives of benzoic acid mustard alkylating agent, phosphate derivatives of etoposide or mitomycin C, cytosine arabinoside, daunorubisin, and phenoxyacetamide derivatives of doxorubicin.

Drug Screening

[0642] Further contemplated is the use of the polypeptides of the present invention, or the polynucleotides encoding these polypeptides, to screen for molecules which modify the activities of the polypeptides of the present invention. Such a method would include contacting the polypeptide of the present invention with a selected compound(s) suspected of having antagonist or agonist activity, and assaying the activity of these polypeptides following binding.

[0643] This invention is particularly useful for screening therapeutic compounds by using the polypeptides of the present invention, or binding fragments thereof, in any of a variety of drug screening techniques. The polypeptide or fragment employed in such a test may be affixed to a solid support, expressed on a cell surface, free in solution, or located intracellularly. One method of drug screening utilizes eukaryotic or prokaryotic host cells that are stably transformed with recombinant nucleic acids expressing the polypeptide or fragment. Drugs are screened against such transformed cells in competitive binding assays. One may measure, for example, the formulation of complexes between the agent being tested and a polypeptide of the present invention.

[0644] Thus, the present invention provides methods of screening for drugs or any other agents that affect activities mediated by the polypeptides of the present invention. These methods comprise contacting such an agent with a polypeptide of the present invention or a fragment thereof and assaying for the presence of a complex between the agent and the polypeptide or a fragment thereof, by methods well known in the art. In such a competitive binding assay, the agents to screen are typically labeled. Following incubation, free agent is separated from that present in bound form, and the amount of free or uncomplexed label is a measure of the ability of a particular agent to bind to the polypeptides of the present invention.

[0645] Another technique for drug screening provides high throughput screening for compounds having suitable binding affinity to the polypeptides of the present invention, and is described in great detail in European Patent Application 84/03564, published on Sep. 13, 1984, which is incorporated herein by reference herein. Briefly stated, large numbers of different small peptide test compounds are synthesized on a solid substrate, such as plastic pins or some other surface. The peptide test compounds are reacted with polypeptides of the present invention and washed. Bound polypeptides are then detected by methods well known in the art. Purified polypeptides are coated directly onto plates for use in the aforementioned drug screening techniques. In addition, non-neutralizing antibodies may be used to capture the peptide and immobilize it on the solid support.

[0646] This invention also contemplates the use of competitive drug screening assays in which neutralizing antibodies capable of binding polypeptides of the present invention specifically compete with a test compound for binding to the polypeptides or fragments thereof. In this manner, the antibodies are used to detect the presence of any peptide which shares one or more antigenic epitopes with a polypeptide of the invention.

[0647] Antisense And Ribozyme (Antagonists) In specific embodiments, antagonists according to the present invention are nucleic acids corresponding to the sequences contained in SEQ ID NO:X, or the complementary strand thereof, and/or to cDNA sequences contained in cDNA ATCC Deposit No: Z identified for example, in Table 1A and/or 1B. In one embodiment, antisense sequence is generated internally, by the organism, in another embodiment, the antisense sequence is separately administered (see, for example, O'Connor, J., Neurochem. 56:560 (1991). Oligodeoxynucleotides as Antisense Inhibitors of Gene Expression, CRC Press, Boca Raton, Fla. (1988). Antisense technology can be used to control gene expression through antisense DNA or RNA, or through triple-helix formation. Antisense techniques are discussed for example, in Okano, J., Neurochem. 56:560 (1991); Oligodeoxynucleotides as Antisense Inhibitors of Gene Expression, CRC Press, Boca Raton, Fla. (1988). Triple helix formation is discussed in, for instance, Lee et al., Nucleic Acids Research 6:3073 (1979); Cooney et al., Science 241:456 (1988); and Dervan et al., Science 251:1300 (1991). The methods are based on binding of a polynucleotide to a complementary DNA or RNA.

[0648] For example, the use of c-myc and c-myb antisense RNA constructs to inhibit the growth of the non-lymphocytic leukemia cell line HL-60 and other cell lines was previously described. (Wickstrom et al. (1988); Anfossi et al. (1989)). These experiments were performed in vitro by incubating cells with the oligoribonucleotide. A similar procedure for in vivo use is described in WO 91/15580. Briefly, a pair of oligonucleotides for a given antisense RNA is produced as follows: A sequence complimentary to the first 15 bases of the open reading frame is flanked by an EcoR1 site on the 5 end and a HindIII site on the 3 end. Next, the pair of oligonucleotides is heated at 90° C. for one minute and then annealed in 2× ligation buffer (20 mM TRIS HCl pH 7.5, 10 mM MgCl2, 10 MM dithiothreitol (DTT) and 0.2 mM ATP) and then ligated to the EcoR1/Hind III site of the retroviral vector PMV7 (WO 91/15580).

[0649] For example, the 5′ coding portion of a polynucleotide that encodes the polypeptide of the present invention may be used to design an antisense RNA oligonucleotide of from about 10 to 40 base pairs in length. A DNA oligonucleotide is designed to be complementary to a region of the gene involved in transcription thereby preventing transcription and the production of the receptor. The antisense RNA oligonucleotide hybridizes to the mRNA in vivo and blocks translation of the mRNA molecule into receptor polypeptide.

[0650] In one embodiment, the antisense nucleic acid of the invention is produced intracellularly by transcription from an exogenous sequence. For example, a vector or a portion thereof, is transcribed, producing an antisense nucleic acid (RNA) of the invention. Such a vector would contain a sequence encoding the antisense nucleic acid. Such a vector can remain episomal or become chromosomally integrated, as long as it can be transcribed to produce the desired antisense RNA. Such vectors can be constructed by recombinant DNA technology methods standard in the art. Vectors can be plasmid, viral, or others known in the art, used for replication and expression in vertebrate cells. Expression of the sequence encoding the polypeptide of the present invention or fragments thereof, can be by any promoter known in the art to act in vertebrate, preferably human cells. Such promoters can be inducible or constitutive. Such promoters include, but are not limited to, the SV40 early promoter region (Bernoist and Chambon, Nature 29:304-310 (1981), the promoter contained in the 3′ long terminal repeat of Rous sarcoma virus (Yamamoto et al., Cell 22:787-797 (1980), the herpes thymidine promoter (Wagner et al., Proc. Natl. Acad. Sci. U.S.A. 78:1441-1445 (1981), the regulatory sequences of the metallothionein gene (Brinster, et al., Nature 296:39-42 (1982)), etc.

[0651] The antisense nucleic acids of the invention comprise a sequence complementary to at least a portion of an RNA transcript of a gene of the present invention. However, absolute complementarity, although preferred, is not required. A sequence “complementary to at least a portion of an RNA,” referred to herein, means a sequence having sufficient complementarity to be able to hybridize with the RNA, forming a stable duplex; in the case of double stranded antisense nucleic acids, a single strand of the duplex DNA may thus be tested, or triplex formation may be assayed. The ability to hybridize will depend on both the degree of complementarity and the length of the antisense nucleic acid. Generally, the larger the hybridizing nucleic acid, the more base mismatches with a RNA it may contain and still form a stable duplex (or triplex as the case may be). One skilled in the art can ascertain a tolerable degree of mismatch by use of standard procedures to determine the melting point of the hybridized complex.

[0652] Oligonucleotides that are complementary to the 5′ end of the message, e.g., the 5′ untranslated sequence up to and including the AUG initiation codon, should work most efficiently at inhibiting translation. However, sequences complementary to the 3′ untranslated sequences of mRNAs have been shown to be effective at inhibiting translation of mRNAs as well. See generally, Wagner, R., 1994, Nature 372:333-335. Thus, oligonucleotides complementary to either the 5′- or 3′-non-translated, non-coding regions of polynucleotide sequences described herein could be used in an antisense approach to inhibit translation of endogenous mRNA. Oligonucleotides complementary to the 5′ untranslated region of the mRNA should include the complement of the AUG start codon. Antisense oligonucleotides complementary to mRNA coding regions are less efficient inhibitors of translation but could be used in accordance with the invention. Whether designed to hybridize to the 5′-, 3′- or coding region of mRNA of the present invention, antisense nucleic acids should be at least six nucleotides in length, and are preferably oligonucleotides ranging from 6 to about 50 nucleotides in length. In specific aspects the oligonucleotide is at least 10 nucleotides, at least 17 nucleotides, at least 25 nucleotides or at least 50 nucleotides.

[0653] The polynucleotides of the invention can be DNA or RNA or chimeric mixtures or derivatives or modified versions thereof, single-stranded or double-stranded. The oligonucleotide can be modified at the base moiety, sugar moiety, or phosphate backbone, for example, to improve stability of the molecule, hybridization, etc. The oligonucleotide may include other appended groups such as peptides (e.g., for targeting host cell receptors in vivo), or agents facilitating transport across the cell membrane (see, e.g., Letsinger et al., 1989, Proc. Natl. Acad. Sci. U.S.A. 86:6553-6556; Lemaitre et al., 1987, Proc. Natl. Acad. Sci. 84:648-652; PCT Publication No. WO88/09810, published Dec. 15, 1988) or the blood-brain barrier (see, e.g., PCT Publication No. WO89/10134, published Apr. 25, 1988), hybridization-triggered cleavage agents. (See, e.g., Krol et al., 1988, BioTechniques 6:958-976) or intercalating agents. (See, e.g., Zon, 1988, Pharm. Res. 5:539-549). To this end, the oligonucleotide may be conjugated to another molecule, e.g., a peptide, hybridization triggered cross-linking agent, transport agent, hybridization-triggered cleavage agent, etc.

[0654] The antisense oligonucleotide may comprise at least one modified base moiety which is selected from the group including, but not limited to, 5-fluorouracil, 5-bromouracil, 5-chlorouracil, 5-iodouracil, hypoxanthine, xantine, 4-acetylcytosine, 5-(carboxyhydroxylmethyl)uracil, 5-carboxymethylaminomethyl-2-thiouridine, 5-carboxymethylaminomethyluracil, dihydrouracil, beta-D-galactosylqueosine, inosine, N6-isopentenyladenine, 1-methylguanine, 1-methylinosine, 2,2-dimethylguanine, 2-methyladenine, 2-methylguanine, 3-methylcytosine, 5-methylcytosine, N6-adenine, 7-methylguanine, 5-methylaminomethyluracil, 5-methoxyaminomethyl-2-thiouracil, beta-D-mannosylqueosine, 5′-methoxycarboxymethyluracil, 5-methoxyuracil, 2-methylthio-N6-isopentenyladenine, uracil-5-oxyacetic acid (v), wybutoxosine, pseudouracil, queosine, 2-thiocytosine, 5-methyl-2-thiouracil, 2-thiouracil, 4-thiouracil, 5-methyluracil, uracil-5-oxyacetic acid methylester, uracil-5-oxyacetic acid (v), 5-methyl-2-thiouracil, 3-(3-amino-3-N-2-carboxypropyl)uracil, (acp3)w, and 2,6-diaminopurine.

[0655] The antisense oligonucleotide may also comprise at least one modified sugar moiety selected from the group including, but not limited to, arabinose, 2-fluoroarabinose, xylulose, and hexose.

[0656] In yet another embodiment, the antisense oligonucleotide comprises at least one modified phosphate backbone selected from the group including, but not limited to, a phosphorothioate, a phosphorodithioate, a phosphoramidothioate, a phosphoramidate, a phosphordiamidate, a methylphosphonate, an alkyl phosphotriester, and a formacetal or analog thereof.

[0657] In yet another embodiment, the antisense oligonucleotide is an a-anomeric oligonucleotide. An a-anomeric oligonucleotide forms specific double-stranded hybrids with complementary RNA in which, contrary to the usual b-units, the strands run parallel to each other (Gautier et al., 1987, Nucl. Acids Res. 15:6625-6641). The oligonucleotide is a 2′-0-methylribonucleotide (Inoue et al., 1987, Nucl. Acids Res. 15:6131-6148), or a chimeric RNA-DNA analogue (Inoue et al., 1987, FEBS Lett. 215:327-330).

[0658] Polynucleotides of the invention may be synthesized by standard methods known in the art, e.g. by use of an automated DNA synthesizer (such as are commercially available from Biosearch, Applied Biosystems, etc.). As examples, phosphorothioate oligonucleotides may be synthesized by the method of Stein et al. (1988, Nucl. Acids Res. 16:3209), methylphosphonate oligonucleotides can be prepared by use of controlled pore glass polymer supports (Sarin et al., 1988, Proc. Natl. Acad. Sci. U.S.A. 85:7448-7451), etc.

[0659] While antisense nucleotides complementary to the coding region sequence could be used, those complementary to the transcribed untranslated region are most preferred.

[0660] Potential antagonists according to the invention also include catalytic RNA, or a ribozyme (See, e.g., PCT International Publication WO 90/11364, published Oct. 4, 1990; Sarver et al, Science 247:1222-1225 (1990). While ribozymes that cleave mRNA at site specific recognition sequences can be used to destroy mRNAs, the use of hammerhead ribozymes is preferred. Hammerhead ribozymes cleave mRNAs at locations dictated by flanking regions that form complementary base pairs with the target mRNA. The sole requirement is that the target mRNA have the following sequence of two bases: 5′-UG-3′. The construction and production of hammerhead ribozymes is well known in the art and is described more fully in Haseloff and Gerlach, Nature 334:585-591 (1988). There are numerous potential hammerhead ribozyme cleavage sites within the nucleotide sequence of SEQ ID NO:X. Preferably, the ribozyme is engineered so that the cleavage recognition site is located near the 5′ end of the mRNA; i.e., to increase efficiency and minimize the intracellular accumulation of non-functional mRNA transcripts.

[0661] As in the antisense approach, the ribozymes of the invention can be composed of modified oligonucleotides (e.g., for improved stability, targeting, etc.) and should be delivered to cells which express in vivo. DNA constructs encoding the ribozyme may be introduced into the cell in the same manner as described above for the introduction of antisense encoding DNA. A preferred method of delivery involves using a DNA construct “encoding” the ribozyme under the control of a strong constitutive promoter, such as, for example, pol III or pol II promoter, so that transfected cells will produce sufficient quantities of the ribozyme to destroy endogenous messages and inhibit translation. Since ribozymes unlike antisense molecules, are catalytic, a lower intracellular concentration is required for efficiency.

[0662] Antagonist/agonist compounds may be employed to inhibit the cell growth and proliferation effects of the polypeptides of the present invention on neoplastic cells and tissues, i.e. stimulation of angiogenesis of tumors, and, therefore, retard or prevent abnormal cellular growth and proliferation, for example, in tumor formation or growth.

[0663] The antagonist/agonist may also be employed to prevent hyper-vascular diseases, and prevent the proliferation of epithelial lens cells after extracapsular cataract surgery. Prevention of the mitogenic activity of the polypeptides of the present invention may also be desirous in cases such as restenosis after balloon angioplasty.

[0664] The antagonist/agonist may also be employed to prevent the growth of scar tissue during wound healing.

[0665] The antagonist/agonist may also be employed to treat the diseases described herein.

[0666] Thus, the invention provides a method of treating disorders or diseases, including but not limited to the disorders or diseases listed throughout this application, associated with overexpression of a polynucleotide of the present invention by administering to a patient (a) an antisense molecule directed to the polynucleotide of the present invention, and/or (b) a ribozyme directed to the polynucleotide of the present invention.

Binding Peptides and Other Molecules

[0667] The invention also encompasses screening methods for identifying polypeptides and nonpolypeptides that bind polypeptides of the invention, and the binding molecules identified thereby. These binding molecules are useful, for example, as agonists and antagonists of the polypeptides of the invention. Such agonists and antagonists can be used, in accordance with the invention, in the therapeutic embodiments described in detail, below.

[0668] This method comprises the steps of:

[0669] contacting polypeptides of the invention with a plurality of molecules; and

[0670] identifying a molecule that binds the polypeptides of the invention.

[0671] The step of contacting the polypeptides of the invention with the plurality of molecules may be effected in a number of ways. For example, one may contemplate immobilizing the polypeptides on a solid support and bringing a solution of the plurality of molecules in contact with the immobilized polypeptides. Such a procedure would be akin to an affinity chromatographic process, with the affinity matrix being comprised of the immobilized polypeptides of the invention. The molecules having a selective affinity for the polypeptides can then be purified by affinity selection. The nature of the solid support, process for attachment of the polypeptides to the solid support, solvent, and conditions of the affinity isolation or selection are largely conventional and well known to those of ordinary skill in the art.

[0672] Alternatively, one may also separate a plurality of polypeptides into substantially separate fractions comprising a subset of or individual polypeptides. For instance, one can separate the plurality of polypeptides by gel electrophoresis, column chromatography, or like method known to those of ordinary skill for the separation of polypeptides. The individual polypeptides can also be produced by a transformed host cell in such a way as to be expressed on or about its outer surface (e.g., a recombinant phage). Individual isolates can then be “probed” by the polypeptides of the invention, optionally in the presence of an inducer should one be required for expression, to determine if any selective affinity interaction takes place between the polypeptides and the individual clone. Prior to contacting the polypeptides with each fraction comprising individual polypeptides, the polypeptides could first be transferred to a solid support for additional convenience. Such a solid support may simply be a piece of filter membrane, such as one made of nitrocellulose or nylon. In this manner, positive clones could be identified from a collection of transformed host cells of an expression library, which harbor a DNA construct encoding a polypeptide having a selective affinity for polypeptides of the invention. Furthermore, the amino acid sequence of the polypeptide having a selective affinity for the polypeptides of the invention can be determined directly by conventional means or the coding sequence of the DNA encoding the polypeptide can frequently be determined more conveniently. The primary sequence can then be deduced from the corresponding DNA sequence. If the amino acid sequence is to be determined from the polypeptide itself, one may use microsequencing techniques. The sequencing technique may include mass spectroscopy.

[0673] In certain situations, it may be desirable to wash away any unbound polypeptides from a mixture of the polypeptides of the invention and the plurality of polypeptides prior to attempting to determine or to detect the presence of a selective affinity interaction. Such a wash step may be particularly desirable when the polypeptides of the invention or the plurality of polypeptides are bound to a solid support.

[0674] The plurality of molecules provided according to this method may be provided by way of diversity libraries, such as random or combinatorial peptide or nonpeptide libraries which can be screened for molecules that specifically bind polypeptides of the invention. Many libraries are known in the art that can be used, e.g., chemically synthesized libraries, recombinant (e.g., phage display libraries), and in vitro translation-based libraries. Examples of chemically synthesized libraries are described in Fodor et al., 1991, Science 251:767-773; Houghten et al., 1991, Nature 354:84-86; Lam et al., 1991, Nature 354:82-84; Medynski, 1994, Bio/Technology 12:709-710; Gallop et al., 1994, J. Medicinal Chemistry 37(9):1233-1251; Ohlmeyer et al., 1993, Proc. Natl. Acad. Sci. USA 90:10922-10926; Erb et al., 1994, Proc. Natl. Acad. Sci. USA 91:11422-11426; Houghten et al., 1992, Biotechniques 13:412; Jayawickreme et al., 1994, Proc. Natl. Acad. Sci. USA 91:1614-1618; Salmon et al., 1993, Proc. Natl. Acad. Sci. USA 90:11708-11712; PCT Publication No. WO 93/20242; and Brenner and Lerner, 1992, Proc. Natl. Acad. Sci. USA 89:5381-5383.

[0675] Examples of phage display libraries are described in Scott and Smith, 1990, Science 249:386-390; Devlin et al., 1990, Science, 249:404-406; Christian, R. B., et al., 1992, J. Mol. Biol. 227:711-718); Lenstra, 1992, J. Immunol. Meth. 152:149-157; Kay et al., 1993, Gene 128:59-65; and PCT Publication No. WO 94/18318 dated Aug. 18, 1994.

[0676] In vitro translation-based libraries include but are not limited to those described in PCT Publication No. WO 91/05058 dated Apr. 18, 1991; and Mattheakis et al., 1994, Proc. Natl. Acad. Sci. USA 91:9022-9026.

[0677] By way of examples of nonpeptide libraries, a benzodiazepine library (see e.g., Bunin et al., 1994, Proc. Natl. Acad. Sci. USA 91:4708-4712) can be adapted for use. Peptoid libraries (Simon et al., 1992, Proc. Natl. Acad. Sci. USA 89:9367-9371) can also be used. Another example of a library that can be used, in which the amide functionalities in peptides have been permethylated to generate a chemically transformed combinatorial library, is described by Ostresh et al. (1994, Proc. Natl. Acad. Sci. USA 91:11138-11142).

[0678] The variety of non-peptide libraries that are useful in the present invention is great. For example, Ecker and Crooke, 1995, Bio/Technology 13:351-360 list benzodiazepines, hydantoins, piperazinediones, biphenyls, sugar analogs, beta-mercaptoketones, arylacetic acids, acylpiperidines, benzopyrans, cubanes, xanthines, aminimides, and oxazolones as among the chemical species that form the basis of various libraries.

[0679] Non-peptide libraries can be classified broadly into two types: decorated monomers and oligomers. Decorated monomer libraries employ a relatively simple scaffold structure upon which a variety functional groups is added. Often the scaffold will be a molecule with a known useful pharmacological activity. For example, the scaffold might be the benzodiazepine structure.

[0680] Non-peptide oligomer libraries utilize a large number of monomers that are assembled together in ways that create new shapes that depend on the order of the monomers. Among the monomer units that have been used are carbamates, pyrrolinones, and morpholinos. Peptoids, peptide-like oligomers in which the side chain is attached to the alpha amino group rather than the alpha carbon, form the basis of another version of non-peptide oligomer libraries. The first non-peptide oligomer libraries utilized a single type of monomer and thus contained a repeating backbone. Recent libraries have utilized more than one monomer, giving the libraries added flexibility.

[0681] Screening the libraries can be accomplished by any of a variety of commonly known methods. See, e.g., the following references, which disclose screening of peptide libraries: Parmley and Smith, 1989, Adv. Exp. Med. Biol. 251:215-218; Scott and Smith, 1990, Science 249:386-390; Fowlkes et al., 1992; BioTechniques 13:422-427; Oldenburg et al., 1992, Proc. Natl. Acad. Sci. USA 89:5393-5397; Yu et al., 1994, Cell 76:933-945; Staudt et al., 1988, Science 241:577-580; Bock et al., 1992, Nature 355:564-566; Tuerk et al., 1992, Proc. Natl. Acad. Sci. USA 89:6988-6992; Ellington et al., 1992, Nature 355:850-852; U.S. Pat. No. 5,096,815, U.S. Pat. No. 5,223,409, and U.S. Pat. No. 5,198,346, all to Ladner et al.; Rebar and Pabo, 1993, Science 263:671-673; and CT Publication No. WO 94/18318.

[0682] In a specific embodiment, screening to identify a molecule that binds polypeptides of the invention can be carried out by contacting the library members with polypeptides of the invention immobilized on a solid phase and harvesting those library members that bind to the polypeptides of the invention. Examples of such screening methods, termed “panning” techniques are described by way of example in Parmley and Smith, 1988, Gene 73:305-318; Fowlkes et al., 1992, BioTechniques 13:422-427; PCT Publication No. WO 94/18318; and in references cited herein.

[0683] In another embodiment, the two-hybrid system for selecting interacting proteins in yeast (Fields and Song, 1989, Nature 340:245-246; Chien et al., 1991, Proc. Natl. Acad. Sci. USA 88:9578-9582) can be used to identify molecules that specifically bind to polypeptides of the invention.

[0684] Where the binding molecule is a polypeptide, the polypeptide can be conveniently selected from any peptide library, including random peptide libraries, combinatorial peptide libraries, or biased peptide libraries. The term “biased” is used herein to mean that the method of generating the library is manipulated so as to restrict one or more parameters that govern the diversity of the resulting collection of molecules, in this case peptides.

[0685] Thus, a truly random peptide library would generate a collection of peptides in which the probability of finding a particular amino acid at a given position of the peptide is the same for all 20 amino acids. A bias can be introduced into the library, however, by specifying, for example, that a lysine occur every fifth amino acid or that positions 4, 8, and 9 of a decapeptide library be fixed to include only arginine. Clearly, many types of biases can be contemplated, and the present invention is not restricted to any particular bias. Furthermore, the present invention contemplates specific types of peptide libraries, such as phage displayed peptide libraries and those that utilize a DNA construct comprising a lambda phage vector with a DNA insert.

[0686] As mentioned above, in the case of a binding molecule that is a polypeptide, the polypeptide may have about 6 to less than about 60 amino acid residues, preferably about 6 to about 10 amino acid residues, and most preferably, about 6 to about 22 amino acids. In another embodiment, a binding polypeptide has in the range of 15-100 amino acids, or 20-50 amino acids.

[0687] The selected binding polypeptide can be obtained by chemical synthesis or recombinant expression.

Other Activities

[0688] A polypeptide, polynucleotide, agonist, or antagonist of the present invention, as a result of the ability to stimulate vascular endothelial cell growth, may be employed in treatment for stimulating re-vascularization of ischemic tissues due to various disease conditions such as thrombosis, arteriosclerosis, and other cardiovascular conditions. The polypeptide, polynucleotide, agonist, or antagonist of the present invention may also be employed to stimulate angiogenesis and limb regeneration, as discussed above.

[0689] A polypeptide, polynucleotide, agonist, or antagonist of the present invention may also be employed for treating wounds due to injuries, burns, post-operative tissue repair, and ulcers since they are mitogenic to various cells of different origins, such as fibroblast cells and skeletal muscle cells, and therefore, facilitate the repair or replacement of damaged or diseased tissue.

[0690] A polypeptide, polynucleotide, agonist, or antagonist of the present invention may also be employed stimulate neuronal growth and to treat and prevent neuronal damage which occurs in certain neuronal disorders or neuro-degenerative conditions such as Alzheimer's disease, Parkinson's disease, and AIDS-related complex. A polypeptide, polynucleotide, agonist, or antagonist of the present invention may have the ability to stimulate chondrocyte growth, therefore, they may be employed to enhance bone and periodontal regeneration and aid in tissue transplants or bone grafts.

[0691] A polypeptide, polynucleotide, agonist, or antagonist of the present invention may be also be employed to prevent skin aging due to sunburn by stimulating keratinocyte growth.

[0692] A polypeptide, polynucleotide, agonist, or antagonist of the present invention may also be employed for preventing hair loss, since FGF family members activate hair-forming cells and promotes melanocyte growth. Along the same lines, a polypeptide, polynucleotide, agonist, or antagonist of the present invention may be employed to stimulate growth and differentiation of hematopoietic cells and bone marrow cells when used in combination with other cytokines.

[0693] A polypeptide, polynucleotide, agonist, or antagonist of the present invention may also be employed to maintain organs before transplantation or for supporting cell culture of primary tissues. A polypeptide, polynucleotide, agonist, or antagonist of the present invention may also be employed for inducing tissue of mesodermal origin to differentiate in early embryos.

[0694] A polypeptide, polynucleotide, agonist, or antagonist of the present invention may also increase or decrease the differentiation or proliferation of embryonic stem cells, besides, as discussed above, hematopoietic lineage.

[0695] A polypeptide, polynucleotide, agonist, or antagonist of the present invention may also be used to modulate mammalian characteristics, such as body height, weight, hair color, eye color, skin, percentage of adipose tissue, pigmentation, size, and shape (e.g., cosmetic surgery). Similarly, a polypeptide, polynucleotide, agonist, or antagonist of the present invention may be used to modulate mammalian metabolism affecting catabolism, anabolism, processing, utilization, and storage of energy.

[0696] A polypeptide, polynucleotide, agonist, or antagonist of the present invention may be used to change a mammal's mental state or physical state by influencing biorhythms, caricadic rhythms, depression (including depressive disorders), tendency for violence, tolerance for pain, reproductive capabilities (preferably by Activin or Inhibin-like activity), hormonal or endocrine levels, appetite, libido, memory, stress, or other cognitive qualities.

[0697] A polypeptide, polynucleotide, agonist, or antagonist of the present invention may also be used as a food additive or preservative, such as to increase or decrease storage capabilities, fat content, lipid, protein, carbohydrate, vitamins, minerals, cofactors or other nutritional components.

[0698] The above-recited applications have uses in a wide variety of hosts. Such hosts include, but are not limited to, human, murine, rabbit, goat, guinea pig, camel, horse, mouse, rat, hamster, pig, micro-pig, chicken, goat, cow, sheep, dog, cat, non-human primate, and human. In specific embodiments, the host is a mouse, rabbit, goat, guinea pig, chicken, rat, hamster, pig, sheep, dog or cat. In preferred embodiments, the host is a mammal. In most preferred embodiments, the host is a human.

### Other Preferred Embodiments

[0699] Other preferred embodiments of the claimed invention include an isolated nucleic acid molecule comprising a nucleotide sequence which is at least 95% identical to a sequence of at least about 50 contiguous nucleotides in the nucleotide sequence of SEQ ID NO:X or the complementary strand thereto, the nucleotide sequence as defined in column 5 of Table 1B or columns 8 and 9 of Table 2 or the complementary strand thereto, and/or cDNA contained in ATCC Deposit No: Z.

[0700] Also preferred is a nucleic acid molecule wherein said sequence of contiguous nucleotides is included in the nucleotide sequence of the portion of SEQ ID NO:X as defined in column 5, “ORF (From-To)”, in Table 1B.1.

[0701] Also preferred is a nucleic acid molecule wherein said sequence of contiguous nucleotides is included in the nucleotide sequence of the portion of SEQ ID NO:X as defined in columns 8 and 9, “NT From” and “NT To” respectively, in Table 2.

[0702] Also preferred is an isolated nucleic acid molecule comprising a nucleotide sequence which is at least 95% identical to a sequence of at least about 150 contiguous nucleotides in the nucleotide sequence of SEQ ID NO:X or the complementary strand thereto, the nucleotide sequence as defined in column 5 of Table 1B.1 or columns 8 and 9 of Table 2 or the complementary strand thereto, and/or cDNA contained in ATCC Deposit No: Z.

[0703] Further preferred is an isolated nucleic acid molecule comprising a nucleotide sequence which is at least 95% identical to a sequence of at least about 500 contiguous nucleotides in the nucleotide sequence of SEQ ID NO:X or the complementary strand thereto, the nucleotide sequence as defined in column 5 of Table 1B.1 or columns 8 and 9 of Table 2 or the complementary strand thereto, and/or cDNA contained in ATCC Deposit No: Z.

[0704] A further preferred embodiment is a nucleic acid molecule comprising a nucleotide sequence which is at least 95% identical to the nucleotide sequence of the portion of SEQ ID NO:X defined in column 5, “ORF (From-To)”, in Table 1B.1.

[0705] A further preferred embodiment is a nucleic acid molecule comprising a nucleotide sequence which is at least 95% identical to the nucleotide sequence of the portion of SEQ ID NO:X defined in columns 8 and 9, “NT From” and “NT To”, respectively, in Table 2.

[0706] A further preferred embodiment is an isolated nucleic acid molecule comprising a nucleotide sequence which is at least 95% identical to the complete nucleotide sequence of SEQ ID NO:X or the complementary strand thereto, the nucleotide sequence as defined in column 5 of Table 1B.1 or columns 8 and 9 of Table 2 or the complementary strand thereto, and/or cDNA contained in ATCC Deposit No: Z.

[0707] Also preferred is an isolated nucleic acid molecule which hybridizes under stringent hybridization conditions to a nucleic acid molecule comprising a nucleotide sequence of SEQ ID NO:X or the complementary strand thereto, the nucleotide sequence as defined in column 5 of Table 1B.1 or columns 8 and 9 of Table 2 or the complementary strand thereto, and/or cDNA contained in ATCC Deposit No: Z, wherein said nucleic acid molecule which hybridizes does not hybridize under stringent hybridization conditions to a nucleic acid molecule having a nucleotide sequence consisting of only A residues or of only T residues.

[0708] Also preferred is a composition of matter comprising a DNA molecule which comprises the cDNA contained in ATCC Deposit No: Z.

[0709] Also preferred is an isolated nucleic acid molecule comprising a nucleotide sequence which is at least 95% identical to a sequence of at least 50 contiguous nucleotides of the cDNA sequence contained in ATCC Deposit No: Z.

[0710] Also preferred is an isolated nucleic acid molecule, wherein said sequence of at least 50 contiguous nucleotides is included in the nucleotide sequence of an open reading frame sequence encoded by cDNA contained in ATCC Deposit No: Z.

[0711] Also preferred is an isolated nucleic acid molecule comprising a nucleotide sequence which is at least 95% identical to sequence of at least 150 contiguous nucleotides in the nucleotide sequence encoded by cDNA contained in ATCC Deposit No: Z.

[0712] A further preferred embodiment is an isolated nucleic acid molecule comprising a nucleotide sequence which is at least 95% identical to sequence of at least 500 contiguous nucleotides in the nucleotide sequence encoded by cDNA contained in ATCC Deposit No: Z.

[0713] A further preferred embodiment is an isolated nucleic acid molecule comprising a nucleotide sequence which is at least 95% identical to the complete nucleotide sequence encoded by cDNA contained in ATCC Deposit No: Z.

[0714] A further preferred embodiment is a method for detecting in a biological sample a nucleic acid molecule comprising a nucleotide sequence which is at least 95% identical to a sequence of at least 50 contiguous nucleotides in a sequence selected from the group consisting of: a nucleotide sequence of SEQ ID NO:X or the complementary strand thereto; the nucleotide sequence as defined in column 5 of Table 1B.1 or columns 8 and 9 of Table 2 or the complementary strand thereto; and a nucleotide sequence encoded by cDNA contained in ATCC Deposit No: Z; which method comprises a step of comparing a nucleotide sequence of at least one nucleic acid molecule in said sample with a sequence selected from said group and determining whether the sequence of said nucleic acid molecule in said sample is at least 95% identical to said selected sequence.

[0715] Also preferred is the above method wherein said step of comparing sequences comprises determining the extent of nucleic acid hybridization between nucleic acid molecules in said sample and a nucleic acid molecule comprising said sequence selected from said group. Similarly, also preferred is the above method wherein said step of comparing sequences is performed by comparing the nucleotide sequence determined from a nucleic acid molecule in said sample with said sequence selected from said group. The nucleic acid molecules can comprise DNA molecules or RNA molecules.

[0716] A further preferred embodiment is a method for identifying the species, tissue or cell type of a biological sample which method comprises a step of detecting nucleic acid molecules in said sample, if any, comprising a nucleotide sequence that is at least 95% identical to a sequence of at least 50 contiguous nucleotides in a sequence selected from the group consisting of: a nucleotide sequence of SEQ ID NO:X or the complementary strand thereto; the nucleotide sequence as defined in column 5 of Table 1B.1 or columns 8 and 9 of Table 2 or the complementary strand thereto; and a nucleotide sequence of the cDNA contained in ATCC Deposit No: Z.

[0717] The method for identifying the species, tissue or cell type of a biological sample can comprise a step of detecting nucleic acid molecules comprising a nucleotide sequence in a panel of at least two nucleotide sequences, wherein at least one sequence in said panel is at least 95% identical to a sequence of at least 50 contiguous nucleotides in a sequence selected from said group.

[0718] Also preferred is a method for diagnosing in a subject a pathological condition associated with abnormal structure or expression of a nucleotide sequence of SEQ ID NO:X or the complementary strand thereto; the nucleotide sequence as defined in column 5 of Table 1B.1 or columns 8 and 9 of Table 2 or the complementary strand thereto; or the cDNA contained in ATCC Deposit No: Z which encodes a protein, wherein the method comprises a step of detecting in a biological sample obtained from said subject nucleic acid molecules, if any, comprising a nucleotide sequence that is at least 95% identical to a sequence of at least 50 contiguous nucleotides in a sequence selected from the group consisting of: a nucleotide sequence of SEQ ID NO:X or the complementary strand thereto; the nucleotide sequence as defined in column 5 of Table 1B.1 or columns 8 and 9 of Table 2 or the complementary strand thereto; and a nucleotide sequence of cDNA contained in ATCC Deposit No: Z.

[0719] The method for diagnosing a pathological condition can comprise a step of detecting nucleic acid molecules comprising a nucleotide sequence in a panel of at least two nucleotide sequences, wherein at least one sequence in said panel is at least 95% identical to a sequence of at least 50 contiguous nucleotides in a sequence selected from said group.

[0720] Also preferred is a composition of matter comprising isolated nucleic acid molecules wherein the nucleotide sequences of said nucleic acid molecules comprise a panel of at least two nucleotide sequences, wherein at least one sequence in said panel is at least 95% identical to a sequence of at least 50 contiguous nucleotides in a sequence selected from the group consisting of: a nucleotide sequence of SEQ ID NO:X or the complementary strand thereto; the nucleotide sequence as defined in column 5 of Table 1B.1 or columns 8 and 9 of Table 2 or the complementary strand thereto; and a nucleotide sequence encoded by cDNA contained in ATCC Deposit No: Z. The nucleic acid molecules can comprise DNA molecules or RNA molecules.

[0721] Also preferred is a composition of matter comprising isolated nucleic acid molecules wherein the nucleotide sequences of said nucleic acid molecules comprise a DNA microarray or “chip” of at least 1, 2, 3, 4, 5, 6, 7, 8, 9, 10, 15, 20, 25, 30, 40, 50, 100, 150, 200, 250, 300, 500, 1000, 2000, 3000, or 4000 nucleotide sequences, wherein at least one sequence in said DNA microarray or “chip” is at least 95% identical to a sequence of at least 50 contiguous nucleotides in a sequence selected from the group consisting of: a nucleotide sequence of SEQ ID NO:X wherein X is any integer as defined in Table 1A and/or 1B; and a nucleotide sequence encoded by a human cDNA clone identified by a cDNA “Clone ID” in Table 1A and/or 1B.

[0722] Also preferred is an isolated polypeptide comprising an amino acid sequence at least 90% identical to a sequence of at least about 10 contiguous amino acids in the polypeptide sequence of SEQ ID NO:Y; a polypeptide encoded by SEQ ID NO:X or the complementary strand thereto; the polypeptide encoded by the nucleotide sequence as defined in columns 8 and 9 of Table 2; and/or a polypeptide encoded by cDNA contained in ATCC Deposit No: Z.

[0723] Also preferred is an isolated polypeptide comprising an amino acid sequence at least 95% identical to a sequence of at least about 30 contiguous amino acids in the amino acid sequence of SEQ ID NO:Y; a polypeptide encoded by SEQ ID NO:X or the complementary strand thereto; the polypeptide encoded by the nucleotide sequence as defined in columns 8 and 9 of Table 2; and/or a polypeptide encoded by cDNA contained in ATCC Deposit No: Z.

[0724] Further preferred is an isolated polypeptide comprising an amino acid sequence at least 95% identical to a sequence of at least about 100 contiguous amino acids in the amino acid sequence of SEQ ID NO:Y; a polypeptide encoded by SEQ ID NO:X or the complementary strand thereto; the polypeptide encoded by the nucleotide sequence as defined in columns 8 and 9 of Table 2; and/or a polypeptide encoded by cDNA contained in ATCC Deposit No: Z.

[0725] Further preferred is an isolated polypeptide comprising an amino acid sequence at least 95% identical to the complete amino acid sequence of SEQ ID NO:Y; a polypeptide encoded by SEQ ID NO:X or the complementary strand thereto; the polypeptide encoded by the nucleotide sequence as defined in columns 8 and 9 of Table 2; and/or a polypeptide encoded by cDNA contained in ATCC Deposit No: Z.

[0726] Further preferred is an isolated polypeptide comprising an amino acid sequence at least 90% identical to a sequence of at least about 10 contiguous amino acids in the complete amino acid sequence of a polypeptide encoded by contained in ATCC Deposit No: Z

[0727] Also preferred is a polypeptide wherein said sequence of contiguous amino acids is included in the amino acid sequence of a portion of said polypeptide encoded by cDNA contained in ATCC Deposit No: Z; a polypeptide encoded by SEQ ID NO:X or the complementary strand thereto; the polypeptide encoded by the nucleotide sequence as defined in columns 8 and 9 of Table 2; and/or the polypeptide sequence of SEQ ID NO:Y.

[0728] Also preferred is an isolated polypeptide comprising an amino acid sequence at least 95% identical to a sequence of at least about 30 contiguous amino acids in the amino acid sequence of a polypeptide encoded by the cDNA contained in ATCC Deposit No: Z.

[0729] Also preferred is an isolated polypeptide comprising an amino acid sequence at least 95% identical to a sequence of at least about 100 contiguous amino acids in the amino acid sequence of a polypeptide encoded by cDNA contained in ATCC Deposit No: Z.

[0730] Also preferred is an isolated polypeptide comprising an amino acid sequence at least 95% identical to the amino acid sequence of a polypeptide encoded by the cDNA contained in ATCC Deposit No: Z.

[0731] Further preferred is an isolated antibody which binds specifically to a polypeptide comprising an amino acid sequence that is at least 90% identical to a sequence of at least 10 contiguous amino acids in a sequence selected from the group consisting of: a polypeptide sequence of SEQ ID NO:Y; a polypeptide encoded by SEQ ID NO:X or the complementary strand thereto; the polypeptide encoded by the nucleotide sequence as defined in columns 8 and 9 of Table 2; and a polypeptide encoded by the cDNA contained in ATCC Deposit No: Z.

[0732] Further preferred is a method for detecting in a biological sample a polypeptide comprising an amino acid sequence which is at least 90% identical to a sequence of at least 10 contiguous amino acids in a sequence selected from the group consisting of: a polypeptide sequence of SEQ ID NO:Y; a polypeptide encoded by SEQ ID NO:X or the complementary strand thereto; the polypeptide encoded by the nucleotide sequence as defined in columns 8 and 9 of Table 2; and a polypeptide encoded by the cDNA contained in ATCC Deposit No: Z; which method comprises a step of comparing an amino acid sequence of at least one polypeptide molecule in said sample with a sequence selected from said group and determining whether the sequence of said polypeptide molecule in said sample is at least 90% identical to said sequence of at least 10 contiguous amino acids.

[0733] Also preferred is the above method wherein said step of comparing an amino acid sequence of at least one polypeptide molecule in said sample with a sequence selected from said group comprises determining the extent of specific binding of polypeptides in said sample to an antibody which binds specifically to a polypeptide comprising an amino acid sequence that is at least 90% identical to a sequence of at least 10 contiguous amino acids in a sequence selected from the group consisting of: a polypeptide sequence of SEQ ID NO:Y; a polypeptide encoded by SEQ ID NO:X or the complementary strand thereto; the polypeptide encoded by the nucleotide sequence as defined in columns 8 and 9 of Table 2; and a polypeptide encoded by the cDNA contained in ATCC Deposit No: Z.

[0734] Also preferred is the above method wherein said step of comparing sequences is performed by comparing the amino acid sequence determined from a polypeptide molecule in said sample with said sequence selected from said group.

[0735] Also preferred is a method for identifying the species, tissue or cell type of a biological sample which method comprises a step of detecting polypeptide molecules in said sample, if any, comprising an amino acid sequence that is at least 90% identical to a sequence of at least 10 contiguous amino acids in a sequence selected from the group consisting of: polypeptide sequence of SEQ ID NO:Y; a polypeptide encoded by SEQ ID NO:X or the complementary strand thereto; the polypeptide encoded by the nucleotide sequence as defined in columns 8 and 9 of Table 2; and a polypeptide encoded by the cDNA contained in ATCC Deposit No: Z.

[0736] Also preferred is the above method for identifying the species, tissue or cell type of a biological sample, which method comprises a step of detecting polypeptide molecules comprising an amino acid sequence in a panel of at least two amino acid sequences, wherein at least one sequence in said panel is at least 90% identical to a sequence of at least 10 contiguous amino acids in a sequence selected from the above group.

[0737] Also preferred is a method for diagnosing in a subject a pathological condition associated with abnormal structure or expression of a nucleic acid sequence identified in Table 1A, 1B or Table 2 encoding a polypeptide, which method comprises a step of detecting in a biological sample obtained from said subject polypeptide molecules comprising an amino acid sequence in a panel of at least two amino acid sequences, wherein at least one sequence in said panel is at least 90% identical to a sequence of at least 10 contiguous amino acids in a sequence selected from the group consisting of: polypeptide sequence of SEQ ID NO:Y; a polypeptide encoded by SEQ ID NO:X or the complementary strand thereto; the polypeptide encoded by the nucleotide sequence as defined in columns 8 and 9 of Table 2; and a polypeptide encoded by the cDNA contained in ATCC Deposit No: Z.

[0738] In any of these methods, the step of detecting said polypeptide molecules includes using an antibody.

[0739] Also preferred is an isolated nucleic acid molecule comprising a nucleotide sequence which is at least 95% identical to a nucleotide sequence encoding a polypeptide wherein said polypeptide comprises an amino acid sequence that is at least 90% identical to a sequence of at least 10 contiguous amino acids in a sequence selected from the group consisting of: polypeptide sequence of SEQ ID NO:Y; a polypeptide encoded by SEQ ID NO:X or the complementary strand thereto; the polypeptide encoded by the nucleotide sequence as defined in columns 8 and 9 of Table 2; and a polypeptide encoded by the cDNA contained in ATCC Deposit No: Z.

[0740] Also preferred is an isolated nucleic acid molecule, wherein said nucleotide sequence encoding a polypeptide has been optimized for expression of said polypeptide in a prokaryotic host.

[0741] Also preferred is a polypeptide molecule, wherein said polypeptide comprises an amino acid sequence selected from the group consisting of: polypeptide sequence of SEQ ID NO:Y; a polypeptide encoded by SEQ ID NO:X or the complementary strand thereto; the polypeptide encoded by the nucleotide sequence as defined in columns 8 and 9 of Table 2; and a polypeptide encoded by the cDNA contained in ATCC Deposit No: Z.

[0742] Further preferred is a method of making a recombinant vector comprising inserting any of the above isolated nucleic acid molecule into a vector. Also preferred is the recombinant vector produced by this method. Also preferred is a method of making a recombinant host cell comprising introducing the vector into a host cell, as well as the recombinant host cell produced by this method.

[0743] Also preferred is a method of making an isolated polypeptide comprising culturing this recombinant host cell under conditions such that said polypeptide is expressed and recovering said polypeptide. Also preferred is this method of making an isolated polypeptide, wherein said recombinant host cell is a eukaryotic cell and said polypeptide is a human protein comprising an amino acid sequence selected from the group consisting of: polypeptide sequence of SEQ ID NO:Y; a polypeptide encoded by SEQ ID NO:X or the complementary strand thereto; the polypeptide encoded by the nucleotide sequence as defined in columns 8 and 9 of Table 2; and a polypeptide encoded by the cDNA contained in ATCC Deposit No: Z. The isolated polypeptide produced by this method is also preferred.

[0744] Also preferred is a method of treatment of an individual in need of an increased level of a protein activity, which method comprises administering to such an individual a Therapeutic comprising an amount of an isolated polypeptide, polynucleotide, immunogenic fragment or analogue thereof, binding agent, antibody, or antigen binding fragment of the claimed invention effective to increase the level of said protein activity in said individual.

[0745] Also preferred is a method of treatment of an individual in need of a decreased level of a protein activity, which method comprised administering to such an individual a Therapeutic comprising an amount of an isolated polypeptide, polynucleotide, immunogenic fragment or analogue thereof, binding agent, antibody, or antigen binding fragment of the claimed invention effective to decrease the level of said protein activity in said individual.

[0746] Also preferred is a method of treatment of an individual in need of a specific delivery of toxic compositions to diseased cells (e.g., tumors, leukemias or lymphomas), which method comprises administering to such an individual a Therapeutic comprising an amount of an isolated polypeptide of the invention, including, but not limited to a binding agent, or antibody of the claimed invention that are associated with toxin or cytotoxic prodrugs.

[0747] Having generally described the invention, the same will be more readily understood by reference to the following examples, which are provided by way of illustration and are not intended as limiting.

Description of Table 6

[0748] Table 6 summarizes some of the ATCC Deposits, Deposit dates, and ATCC designation numbers of deposits made with the ATCC in connection with the present application. These deposits were made in addition to those described in the Table 1A.

TABLE 6

| ATCC Deposits | Deposit Date | ATGC Designation Number |
|---|---|---|
| LP01, LP02, LP03, LP04, | May-20-97 | 209059, 209060, 209061, |
| LP05, LP06, LP07, LP08, | | 209062, 209063, 209064, |
| LP09, LP10, LP11, | | 209065, 209066, 209067, |
| | | 209068, 209069 |
| LP12 | Jan-12-98 | 209579 |
| LP13 | Jan-12-98 | 209578 |
| LP14 | Jul-16-98 | 203067 |
| LP15 | Jul-16-98 | 203068 |
| LP16 | Feb-1-99 | 203609 |
| LP17 | Feb-1-99 | 203610 |
| LP20 | Nov-17-98 | 203485 |
| LP21 | Jun-18-99 | PTA-252 |
| LP22 | Jun-18-99 | PTA-253 |
| LP23 | Dec-22-99 | PTA-1081 |

### EXAMPLES

### Example 1

### Isolation of a Selected cDNA Clone from the Deposited Sample

[0749] Each ATCC Deposit No: Z is contained in a plasmid vector. Table 7 identifies the vectors used to construct the cDNA library from which each clone was isolated. In many cases, the vector used to construct the library is a phage vector from which a plasmid has been excised. The following correlates the related plasmid for each phage vector used in constructing the cDNA library. For example, where a particular clone is identified in Table 7 as being isolated in the vector “Lambda Zap,” the corresponding deposited clone is in “pBluescript.”

| Vector Used to Construct Library | Corresponding Deposited Plasmid |
|---|---|
| Lambda Zap | pBluescript (pBS) |
| Uni-Zap XR | pBluescript (pBS) |
| Zap Express | pBK |
| lafmid BA | plafmid BA |
| pSport1 | pSport1 |
| pCMVSport 2.0 | pCMVSport 2.0 |
| pCMVSport 3.0 | pCMVSport 3.0 |
| pCR ® 2.1 | pCR ® 2.1 |

[0750] Vectors Lambda Zap (U.S. Pat. Nos. 5,128,256 and 5,286,636), Uni-Zap XR (U.S. Pat. Nos. 5,128,256 and 5,286,636), Zap Express (U.S. Pat. Nos. 5,128,256 and 5,286,636), pBluescript (pBS) (Short, J. M. et al., Nucleic Acids Res. 16:7583-7600 (1988); Alting-Mees, M. A. and Short, J. M., Nucleic Acids Res. 17:9494 (1989)) and pBK (Alting-Mees, M. A. et al., Strategies 5:58-61 (1992)) are commercially available from Stratagene Cloning Systems, Inc., 11011 N. Torrey Pines Road, La Jolla, Calif., 92037. pBS contains an ampicillin resistance gene and pBK contains a neomycin resistance gene. Both can be transformed into E. coli strain XL-1 Blue, also available from Stratagene. pBS comes in 4 forms SK+, SK−, KS+ and KS. The S and K refers to the orientation of the polylinker to the T7 and T3 primer sequences which flank the polylinker region (“S” is for SacI and “K” is for KpnI which are the first sites on each respective end of the linker). “+” or “−” refer to the orientation of the f1 origin of replication (“ori”), such that in one orientation, single stranded rescue initiated from the f1 ori generates sense strand DNA and in the other, antisense.

[0751] Vectors pSport1, pCMVSport 2.0 and pCMVSport 3.0, were obtained from Life Technologies, Inc., P.O. Box 6009, Gaithersburg, Md. 20897. All Sport vectors contain an ampicillin resistance gene and may be transformed into E. coli strain DH10B, also available from Life Technologies. (See, for instance, Gruber, C. E., et al., Focus 15:59 (1993)). Vector lafmid BA (Bento Soares, Columbia University, NY) contains an ampicillin resistance gene and can be transformed into E. coli strain XL-1 Blue. Vector pCR®2.1, which is available from Invitrogen, 1600 Faraday Avenue, Carlsbad, Calif. 92008, contains an ampicillin resistance gene and may be transformed into E. coli strain DH10B, available from Life Technologies. (See, for instance, Clark, J. M., Nuc. Acids Res. 16:9677-9686 (1988) and Mead, D. et al., Bio/Technology 9: (1991)). Preferably, a polynucleotide of the present invention does not comprise the phage vector sequences identified for the particular clone in Table 7, as well as the corresponding plasmid vector sequences designated above.

[0752] The deposited material in the sample assigned the ATCC Deposit Number cited by reference to Table 1A, Table 2, Table 6 and Table 7 for any given cDNA clone also may contain one or more additional plasmids, each comprising a cDNA clone different from that given clone. Thus, deposits sharing the same ATCC Deposit Number contain at least a plasmid for each ATCC Deposit No: Z.

TABLE 7

| | | | ATCC |
|---|---|---|---|
| Libraries owned by Catalog | Catalog Description | Vector | Deposit |
| HUKA HUKB HUKC HUKD | Human Uterine Cancer | Lambda ZAP II | LP01 |
| HUKE HUKF HUKG | | | |
| HCNA HCNB | Human Colon | Lambda Zap II | LP01 |
| HFFA | Human Fetal Brain, random | Lambda Zap II | LP01 |
| | primed | | |
| HTWA | Resting T-Cell | Lambda ZAP II | LP01 |
| HBQA | Early Stage Human Brain, random | Lambda ZAP II | LP01 |
| | primed | | |
| HLMB HLMF HLMG | breast lymph node CDNA library | Lambda ZAP II | LP01 |
| HLMH HLMI HLMJ HLMM | | | |
| HLMN | | | |
| HCQA HCQB | human colon cancer | Lamda ZAP II | LP01 |
| HMEA HMEC HMED | Human Microvascular Endothelial | Lambda ZAP II | LP01 |
| HMEE HMEF HMEG HMEI | Cells, fract. A | | |
| HMEJ HMEK HMEL | | | |
| HUSA HUSC | Human Umbilical Vein | Lambda ZAP II | LP01 |
| | Endothelial Cells, fract. A | | |
| HLQA HLQB | Hepatocellular Tumor | Lambda ZAP II | LP01 |
| HHGA HHGB HHGC HHGD | Hemangiopericytoma | Lambda ZAP II | LP01 |
| HSDM | Human Striatum Depression, re- | Lambda ZAP II | LP01 |
| | rescue | | |
| HUSH | H Umbilical Vein Endothelial | Lambda ZAP II | LP01 |
| | Cells, frac A, re-excision | | |
| HSGS | Salivary gland, subtracted | Lambda ZAP II | LP01 |
| HFXA HFXB HFXC HFXD | Brain frontal cortex | Lambda ZAP II | LP01 |
| HFXE HFXF HFXG HFXH | | | |
| HPQA HPQB HPQC | PERM TF274 | Lambda ZAP II | LP01 |
| HFXJ HFXK | Brain Frontal Cortex, re-excision | Lambda ZAP II | LP01 |
| HCWA HCWB HCWC | CD34 positive cells (Cord Blood) | ZAP Express | LP02 |
| HCWD HCWE HCWF | | | |
| HCWG HCWH HCWI HCWJ | | | |
| HCWK | | | |
| HCUA HCUB HCUC | CD34 depleted Buffy Coat (Cord | ZAP Express | LP02 |
| | Blood) | | |
| HRSM | A-14 cell line | ZAP Express | LP02 |
| HRSA | A1-CELL LINE | ZAP Express | LP02 |
| HCUD HCUE HCUF HCUG | CD34 depleted Buffy Coat (Cord | ZAP Express | LP02 |
| HCUH HCUI | Blood), re-excision | | |
| HBXE HBXF HBXG | H. Whole Brain #2, re-excision | ZAP Express | LP02 |
| HRLM | L8 cell line | ZAP Express | LP02 |
| HBXA HBXB HBXC HBXD | Human Whole Brain #2 - Oligo dT | ZAP Express | LP02 |
| | >1.5 Kb | | |
| HUDA HUDB HUDC | Testes | ZAP Express | LP02 |
| HHTM HHTN HHTO | H. hypothalamus, frac A; re- | ZAP Express | LP02 |
| | excision | | |
| HHTL | H. hypothalamus, frac A | ZAP Express | LP02 |
| HASA HASD | Human Adult Spleen | Uni-ZAP XR | LP03 |
| HFKC HFKD HFKE HFKF | Human Fetal Kidney | Uni-ZAP XR | LP03 |
| HFKG | | | |
| HE8A HE8B HE8C HE8D | Human 8 Week Whole Embryo | Uni-ZAP XR | LP03 |
| HE8E HE8F HE8M HE8N | | | |
| HGBA HGBD HGBE HGBF | Human Gall Bladder | Uni-ZAP XR | LP03 |
| HGBG HGBH HGBI | | | |
| HLHA HLHB HLHC HLHD | Human Fetal Lung III | Uni-ZAP XR | LP03 |
| HLHE HLHF HLHG HLHH | | | |
| HLHQ | | | |
| HPMA HPMB HPMC HPMD | Human Placenta | Uni-ZAP XR | LP03 |
| HPME HPMF HPMG HPMH | | | |
| HPRA HPRB HPRC HPRD | Human Prostate | Uni-ZAP XR | LP03 |
| HSIA HSIC HSID HSIE | Human Adult Small Intestine | Uni-ZAP XR | LP03 |
| HTEA HTEB HTEC HTED | Human Testes | Uni-ZAP XR | LP03 |
| HTEE HTEF HTEG HTEH | | | |
| HTEI HTEJ HTEK | | | |
| HTPA HTPB HTPC HTPD | Human Pancreas Tumor | Uni-ZAP XR | LP03 |
| HTPE | | | |
| HTTA HTTB HTTC HTTD | Human Testes Tumor | Uni-ZAP XR | LP03 |
| HTTE HTTF | | | |
| HAPA HAPB HAPC HAPM | Human Adult Pulmonary | Uni-ZAP XR | LP03 |
| HETA HETB HETC HETD | Human Endometrial Tumor | Uni-ZAP XR | LP03 |
| HETE HETF HETG HETH | | | |
| HETI | | | |
| HHFB HHFC HHFD HHFE | Human Fetal Heart | Uni-ZAP XR | LP03 |
| HHFF HHFG HHFH HHFI | | | |
| HHPB HHPC HHPD HHPE | Human Hippocampus | Uni-ZAP XR | LP03 |
| HHPF HHPG HHPH | | | |
| HCE1 HCE2 HCE3 HCE4 | Human Cerebellum | Uni-ZAP XR | LP03 |
| HCE5 HCEB HCEC HCED | | | |
| HCEE HCEF HCEG | | | |
| HUVB HUVC HUVD HUVE | Human Umbilical Vein, Endo. | Uni-ZAP XR | LP03 |
| | remake | | |
| HSTA HSTB HSTC HSTD | Human Skin Tumor | Uni-ZAP XR | LP03 |
| HTAA HTAB HTAC HTAD | Human Activated T-Cells | Uni-ZAP XR | LP03 |
| HTAE | | | |
| HFEA HFEB HFEC | Human Fetal Epithelium (Skin) | Uni-ZAP XR | LP03 |
| HJPA HJPB HJPC HJPD | HUMAN JURKAT MEMBRANE | Uni-ZAP XR | LP03 |
| | BOUND POLYSOMES | | |
| HESA | Human epithelioid sarcoma | Uni-Zap XR | LP03 |
| HLTA HLTB HLTC HLTD | Human T-Cell Lymphoma | Uni-ZAP XR | LP03 |
| HLTE HLTF | | | |
| HFTA HFTB HFTC HFTD | Human Fetal Dura Mater | Uni-ZAP XR | LP03 |
| HRDA HRDB HRDC HRDD | Human Rhabdomyosarcoma | Uni-ZAP XR | LP03 |
| HRDE HRDF | | | |
| HCAA HCAB HCAC | Cem cells cyclohexamide treated | Uni-ZAP XR | LP03 |
| HRGA HRGB HRGC HRGD | Raji Cells, cyclohexamide treated | Uni-ZAP XR | LP03 |
| HSUA HSUB HSUC HSUM | Supt Cells, cyclohexamide treated | Uni-ZAP XR | LP03 |
| HT4A HT4C HT4D | Activated T-Cells, 12 hrs. | Uni-ZAP XR | LP03 |
| HE9A HE9B HE9C HE9D | Nine Week Old Early Stage | Uni-ZAP XR | LP03 |
| HE9E HE9F HE9G HE9H | Human | | |
| HE9M HE9N | | | |
| HATA HATB HATC HATD | Human Adrenal Gland Tumor | Uni-ZAP XR | LP03 |
| HATE | | | |
| HT5A | Activated T-Cells, 24 hrs. | Uni-ZAP XR | LP03 |
| HFGA HFGM | Human Fetal Brain | Uni-ZAP XR | LP03 |
| HNEA HNEB HNEC HNED | Human Neutrophil | Uni-ZAP XR | LP03 |
| HNEE | | | |
| HBGB HBGD | Human Primary Breast Cancer | Uni-ZAP XR | LP03 |
| HBNA HBNB | Human Normal Breast | Uni-ZAP XR | LP03 |
| HCAS | Cem Cells, cyclohexamide treated, | Uni-ZAP XR | LP03 |
| | subtra | | |
| HHPS | Human Hippocampus, subtracted | pBS | LP03 |
| HKCS HKCU | Human Colon Cancer, subtracted | pBS | LP03 |
| HRGS | Raji cells, cyclohexamide treated, | pBS | LP03 |
| | subtracted | | |
| HSUT | Supt cells, cyclohexamide treated, | pBS | LP03 |
| | differentially expressed | | |
| HT4S | Activated T-Cells, 12 hrs, | Uni-ZAP XR | LP03 |
| | subtracted | | |
| HCDA HCDB HCDC HCDD | Human Chondrosarcoma | Uni-ZAP XR | LP03 |
| HCDE | | | |
| HOAA HOAB HOAC | Human Osteosarcoma | Uni-ZAP XR | LP03 |
| HTLA HTLB HTLC HTLD | Human adult testis, large inserts | Uni-ZAP XR | LP03 |
| HTLE HTLF | | | |
| HLMA HLMC HLMD | Breast Lymph node cDNA library | Uni-ZAP XR | LP03 |
| H6EA H6EB H6EC | HL-60, PMA 4H | Uni-ZAP XR | LP03 |
| HTXA HTXB HTXC HTXD | Activated T-Cell | Uni-ZAP XR | LP03 |
| HTXE HTXF HTXG HTXH | (12 hs)/Thiouridine labelledEco | | |
| HNFA HNFB HNFC HNFD | Human Neutrophil, Activated | Uni-ZAP XR | LP03 |
| HNFE HNFF HNFG HNFH | | | |
| HNFJ | | | |
| HTOB HTOC | HUMAN TONSILS, FRACTION 2 | Uni-ZAP XR | LP03 |
| HMGB | Human OB MG63 control fraction I | Uni-ZAP XR | LP03 |
| HOPB | Human OB HOS control fraction I | Uni-ZAP XR | LP03 |
| HORB | Human OB HOS treated (10 nM | Uni-ZAP XR | LP03 |
| | E2) fraction I | | |
| HSVA HSVB HSVC | Human Chronic Synovitis | Uni-ZAP XR | LP03 |
| HROA | HUMAN STOMACH | Uni-ZAP XR | LP03 |
| HBJA HBJB HBJC HBJD | HUMAN B CELL LYMPHOMA | Uni-ZAP XR | LP03 |
| HBJE HBJF HBJG HBJH | | | |
| HBJI HBJJ HBJK | | | |
| HCRA HCRB HCRC | human corpus colosum | Uni-ZAP XR | LP03 |
| HODA HODB HODC HODD | human ovarian cancer | Uni-ZAP XR | LP03 |
| HDSA | Dermatofibrosarcoma | Uni-ZAP XR | LP03 |
| | Protuberance | | |
| HMWA HMWB HMWC | Bone Marrow Cell Line (RS4; 11) | Uni-ZAP XR | LP03 |
| HMWD HMWE HMWF | | | |
| HMWG HMWH HMWI | | | |
| HMWJ | | | |
| HSOA | stomach cancer (human) | Uni-ZAP XR | LP03 |
| HERA | SKIN | Uni-ZAP XR | LP03 |
| HMDA | Brain-medulloblastoma | Uni-ZAP XR | LP03 |
| HGLA HGLB HGLD | Glioblastoma | Uni-ZAP XR | LP03 |
| HEAA | H. Atrophic Endometrium | Uni-ZAP XR | LP03 |
| HBCA HBCB | H. Lymph node breast Cancer | Uni-ZAP XR | LP03 |
| HPWT | Human Prostate BPH, re-excision | Uni-ZAP XR | LP03 |
| HFVG HFVH HFVI | Fetal Liver, subtraction II | pBS | LP03 |
| HNFI | Human Neutrophils, Activated, re- | pBS | LP03 |
| | excision | | |
| HBMB HBMC HBMD | Human Bone Marrow, re-excision | pBS | LP03 |
| HKML HKMM HKMN | H. Kidney Medulla, re-excision | pBS | LP03 |
| HKIX HKIY | H. Kidney Cortex, subtracted | pBS | LP03 |
| HADT | H. Amygdala Depression, | pBS | LP03 |
| | subtracted | | |
| H6AS | Hl-60, untreated, subtracted | Uni-ZAP XR | LP03 |
| H6ES | HL-60, PMA 4H, subtracted | Uni-ZAP XR | LP03 |
| H6BS | HL-60, RA 4h, Subtracted | Uni-ZAP XR | LP03 |
| H6CS | HL-60, PMA 1d, subtracted | Uni-ZAP XR | LP03 |
| HTXJ HTXK | Activated T-cell(12 h)/Thiouridine- | Uni-ZAP XR | LP03 |
| | re-excision | | |
| HMSA HMSB HMSC HMSD | Monocyte activated | Uni-ZAP XR | LP03 |
| HMSE HMSF HMSG HMSH | | | |
| HMSI HMSJ HMSK | | | |
| HAGA HAGB HAGC HAGD | Human Amygdala | Uni-ZAP XR | LP03 |
| HAGE HAGF | | | |
| HSRA HSRB HSRE | STROMAL - OSTEOCLASTOMA | Uni-ZAP XR | LP03 |
| HSRD HSRF HSRG HSRH | Human Osteoclastoma Stromal | Uni-ZAP XR | LP03 |
| | Cells - unamplified | | |
| HSQA HSQB HSQC HSQD | Stromal cell TF274 | Uni-ZAP XR | LP03 |
| HSQE HSQF HSQG | | | |
| HSKA HSKB HSKC HSKD | Smooth muscle, serum treated | Uni-ZAP XR | LP03 |
| HSKE HSKF HSKZ | | | |
| HSLA HSLB HSLC HSLD | Smooth muscle, control | Uni-ZAP XR | LP03 |
| HSLE HSLF HSLG | | | |
| HSDA HSDD HSDE HSDF | Spinal cord | Uni-ZAP XR | LP03 |
| HSDG HSDH | | | |
| HPWS | Prostate-BPH subtracted II | pBS | LP03 |
| HSKW HSKX HSKY | Smooth Muscle- HASTE | pBS | LP03 |
| | normalized | | |
| HFPB HFPC HFPD | H. Frontal cortex, epileptic; re- | Uni-ZAP XR | LP03 |
| | excision | | |
| HSDI HSDJ HSDK | Spinal Cord, re-excision | Uni-ZAP XR | LP03 |
| HSKN HSKO | Smooth Muscle Serum Treated, | pBS | LP03 |
| | Norm | | |
| HSKG HSKH HSKI | Smooth muscle, serum induced, re- | pBS | LP03 |
| | exc | | |
| HFCA HFCB HFCC HFCD | Human Fetal Brain | Uni-ZAP XR | LP04 |
| HFCE HFCF | | | |
| HPTA HPTB HPTD | Human Pituitary | Uni-ZAP XR | LP04 |
| HTHB HTHC HTHD | Human Thymus | Uni-ZAP XR | LP04 |
| HE6B HE6C HE6D HE6E | Human Whole Six Week Old | Uni-ZAP XR | LP04 |
| HE6F HE6G HE6S | Embryo | | |
| HSSA HSSB HSSC HSSD | Human Synovial Sarcoma | Uni-ZAP XR | LP04 |
| HSSE HSSF HSSG HSSH | | | |
| HSSI HSSJ HSSK | | | |
| HE7T | 7 Week Old Early Stage Human, | Uni-ZAP XR | LP04 |
| | subtracted | | |
| HEPA HEPB HEPC | Human Epididymus | Uni-ZAP XR | LP04 |
| HSNA HSNB HSNC HSNM | Human Synovium | Uni-ZAP XR | LP04 |
| HSNN | | | |
| HPFB HPFC HPFD HPFE | Human Prostate Cancer, Stage C | Uni-ZAP XR | LP04 |
| | fraction | | |
| HE2A HE2D HE2E HE2H | 12 Week Old Early Stage Human | Uni-ZAP XR | LP04 |
| HE2I HE2M HE2N HE2O | | | |
| HE2B HE2C HE2F HE2G | 12 Week Old Early Stage Human, | Uni-ZAP XR | LP04 |
| HE2P HE2Q | II | | |
| HPTS HPTT HPTU | Human Pituitary, subtracted | Uni-ZAP XR | LP04 |
| HAUA HAUB HAUC | Amniotic Cells - TNF induced | Uni-ZAP XR | LP04 |
| HAQA HAQB HAQC HAQD | Amniotic Cells - Primary Culture | Uni-ZAP XR | LP04 |
| HWTA HWTB HWTC | wilm's tumor | Uni-ZAP XR | LP04 |
| HBSD | Bone Cancer, re-excision | Uni-ZAP XR | LP04 |
| HSGB | Salivary gland, re-excision | Uni-ZAP XR | LP04 |
| HSJA HSJB HSJC | Smooth muscle-ILb induced | Uni-ZAP XR | LP04 |
| HSXA HSXB HSXC HSXD | Human Substantia Nigra | Uni-ZAP XR | LP04 |
| HSHA HSHB HSHC | Smooth muscle, IL1b induced | Uni-ZAP XR | LP04 |
| HOUA HOUB HOUC HOUD | Adipocytes | Uni-ZAP XR | LP04 |
| HOUE | | | |
| HPWA HPWB HPWC | Prostate BPH | Uni-ZAP XR | LP04 |
| HPWD HPWE | | | |
| HELA HELB HELC HELD | Endothelial cells-control | Uni-ZAP XR | LP04 |
| HELE HELF HELG HELH | | | |
| HEMA HEMB HEMC | Endothelial-induced | Uni-ZAP XR | LP04 |
| HEMD HEME HEMF HEMG | | | |
| HEMH | | | |
| HBIA HBIB HBIC | Human Brain, Striatum | Uni-ZAP XR | LP04 |
| HHSA HHSB HHSC HHSD | Human | Uni-ZAP XR | LP04 |
| HHSE | Hypothalmus, Schizophrenia | | |
| HNGA HNGB HNGC HNGD | neutrophils control | Uni-ZAP XR | LP04 |
| HNGE HNGF HNGG HNGH | | | |
| HNGI HNGJ | | | |
| HNHA HNHB HNHC HNHD | Neutrophils IL-1 and LPS induced | Uni-ZAP XR | LP04 |
| HNHE HNHF HNHG HNHH | | | |
| HNHI HNHJ | | | |
| HSDB HSDC | STRIATUM DEPRESSION | Uni-ZAP XR | LP04 |
| HHPT | Hypothalamus | Uni-ZAP XR | LP04 |
| HSAT HSAU HSAV HSAW | Anergic T-cell | Uni-ZAP XR | LP04 |
| HSAX HSAY HSAZ | | | |
| HBMS HBMT HBMU | Bone marrow | Uni-ZAP XR | LP04 |
| HBMV HBMW HBMX | | | |
| HOEA HOEB HOEC HOED | Osteoblasts | Uni-ZAP XR | LP04 |
| HOEE HOEF HOEJ | | | |
| HAIA HAIB HAIC HAID | Epithelial-TNFa and INF induced | Uni-ZAP XR | LP04 |
| HAIE HAIF | | | |
| HTGA HTGB HTGC HTGD | Apoptotic T-cell | Uni-ZAP XR | LP04 |
| HMCA HMCB HMCC | Macrophage-oxLDL | Uni-ZAP XR | LP04 |
| HMCD HMCE | | | |
| HMAA HMAB HMAC | Macrophage (GM-CSF treated) | Uni-ZAP XR | LP04 |
| HMAD HMAE HMAF | | | |
| HMAG | | | |
| HPHA | Normal Prostate | Uni-ZAP XR | LP04 |
| HPIA HPIB HPIC | LNCAP prostate cell line | Uni-ZAP XR | LP04 |
| HPJA HPJB HPJC | PC3 Prostate cell line | Uni-ZAP XR | LP04 |
| HOSE HOSF HOSG | Human Osteoclastoma, re-excision | Uni-ZAP XR | LP04 |
| HTGE HTGF | Apoptotic T-cell, re-excision | Uni-ZAP XR | LP04 |
| HMAJ HMAK | H Macrophage (GM-CSF treated), | Uni-ZAP XR | LP04 |
| | re-excision | | |
| HACB HACC HACD | Human Adipose Tissue, re- | Uni-ZAP XR | LP04 |
| | excision | | |
| HFPA | H. Frontal Cortex, Epileptic | Uni-ZAP XR | LP04 |
| HFAA HFAB HFAC HFAD | Alzheimer's, spongy change | Uni-ZAP XR | LP04 |
| HFAE | | | |
| HFAM | Frontal Lobe, Dementia | Uni-ZAP XR | LP04 |
| HMIA HMIB HMIC | Human Manic Depression Tissue | Uni-ZAP XR | LP04 |
| HTSA HTSE HTSF HTSG | Human Thymus | pBS | LP05 |
| HTSH | | | |
| HPBA HPBB HPBC HPBD | Human Pineal Gland | pBS | LP05 |
| HPBE | | | |
| HSAA HSAB HSAC | HSA 172 Cells | pBS | LP05 |
| HSBA HSBB HSBC HSBM | HSC172 cells | pBS | LP05 |
| HJAA HJAB HJAC HJAD | Jurkat T-cell G1 phase | pBS | LP05 |
| HJBA HJBB HJBC HJBD | Jurkat T-Cell, S phase | pBS | LP05 |
| HAFA HAFB | Aorta endothelial cells + TNF-a | pBS | LP05 |
| HAWA HAWB HAWC | Human White Adipose | pBS | LP05 |
| HTNA HTNB | Human Thyroid | pBS | LP05 |
| HONA | Normal Ovary, Premenopausal | pBS | LP05 |
| HARA HARB | Human Adult Retina | pBS | LP05 |
| HLJA HLJB | Human Lung | pCMVSport 1 | LP06 |
| HOFM HOFN HOFO | H. Ovarian Tumor, II, OV5232 | pCMVSport 2.0 | LP07 |
| HOGA HOGB HOGC | OV 10-3-95 | pCMVSport 2.0 | LP07 |
| HCGL | CD34+cells, II | pCMVSport 2.0 | LP07 |
| HDLA | Hodgkin's Lymphoma I | pCMVSport 2.0 | LP07 |
| HDTA HDTB HDTC HDTD | Hodgkin's Lymphoma II | pCMVSport 2.0 | LP07 |
| HDTE | | | |
| HKAA HKAB HKAC HKAD | Keratinocyte | pCMVSport2.0 | LP07 |
| HKAE HKAF HKAG HKAH | | | |
| HCIM | CAPFINDER, Crohn's Disease, lib 2 | pCMVSport 2.0 | LP07 |
| HKAL | Keratinocyte, lib 2 | pCMVSport2.0 | LP07 |
| HKAT | Keratinocyte, lib 3 | pCMVSport2.0 | LP07 |
| HNDA | Nasal polyps | pCMVSport2.0 | LP07 |
| HDRA | H. Primary Dendritic Cells, lib 3 | pCMVSport2.0 | LP07 |
| HOHA HOHB HOHC | Human Osteoblasts II | pCMVSport2.0 | LP07 |
| HLDA HLDB HLDC | Liver, Hepatoma | pCMVSport3.0 | LP08 |
| HLDN HLDO HLDP | Human Liver, normal | pCMVSport3.0 | LP08 |
| HMTA | pBMC stimulated w/ poly I/C | pCMVSport3.0 | LP08 |
| HNTA | NTERA2, control | pCMVSport3.0 | LP08 |
| HDPA HDPB HDPC HDPD | Primary Dendritic Cells, lib 1 | pCMVSport3.0 | LP08 |
| HDPF HDPG HDPH HDPI | | | |
| HDPJ HDPK | | | |
| HDPM HDPN HDPO HDPP | Primary Dendritic cells, frac 2 | pCMVSport3.0 | LP08 |
| HMUA HMUB HMUC | Myoloid Progenitor Cell Line | pCMVSport3.0 | LP08 |
| HHEA HHEB HHEC HHED | T Cell helper I | pCMVSport3.0 | LP08 |
| HHEM HHEN HHEO HHEP | T cell helper II | pCMVSport3.0 | LP08 |
| HEQA HEQB HEQC | Human endometrial stromal cells | pCMVSport3.0 | LP08 |
| HJMA HJMB | Human endometrial stromal cells- | pCMVSport3.0 | LP08 |
| | treated with progesterone | | |
| HSWA HSWB HSWC | Human endometrial stromal cells- | pCMVSport3.0 | LP08 |
| | treated with estradiol | | |
| HSYA HSYB HSYC | Human Thymus Stromal Cells | pCMVSport3.0 | LP08 |
| HLWA HLWB HLWC | Human Placenta | pCMVSport3.0 | LP08 |
| HRAA HRAB HRAC | Rejected Kidney, lib 4 | pCMVSport3.0 | LP08 |
| HMTM | PCR, pBMC I/C treated | PCRII | LP09 |
| HMJA | H. Meniingima, M6 | pSport 1 | LP10 |
| HMKA HMKB HMKC | H. Meningima, M1 | pSport 1 | LP10 |
| HMKD HMKE | | | |
| HUSG HUSI | Human umbilical vein endothelial | pSport 1 | LP10 |
| | cells, IL-4 induced | | |
| HUSX HUSY | Human Umbilical Vein | pSport 1 | LP10 |
| | Endothelial Cells, uninduced | | |
| HOFA | Ovarian Tumor I, OV5232 | pSport 1 | LP10 |
| HCFA HCFB HCFC HCFD | T-Cell PHA 16 hrs | pSport 1 | LP10 |
| HCFL HCFM HCFN HCFO | T-Cell PHA 24 hrs | pSport 1 | LP10 |
| HADA HADC HADD HADE | Human Adipose | pSport 1 | LP10 |
| HADF HADG | | | |
| HOVA HOVB HOVC | Human Ovary | pSport 1 | LP10 |
| HTWB HTWC HTWD | Resting T-Cell Library, II | pSport 1 | LP10 |
| HTWE HTWF | | | |
| HMMA | Spleen metastic melanoma | pSport 1 | LP10 |
| HLYA HLYB HLYC HLYD | Spleen, Chronic lymphocytic | pSport 1 | LP10 |
| HLYE | leukemia | | |
| HCGA | CD34+ cell, I | pSport 1 | LP10 |
| HEOM HEON | Human Eosinophils | pSport 1 | LP10 |
| HTDA | Human Tonsil, Lib 3 | pSport 1 | LP10 |
| HSPA | Salivary Gland, Lib 2 | pSport 1 | LP10 |
| HCHA HCHB HCHC | Breast Cancer cell line, MDA 36 | pSport 1 | LP10 |
| HCHM HCHN | Breast Cancer Cell line, angiogenic | pSport 1 | LP10 |
| HCIA | Crohn's Disease | pSport 1 | LP10 |
| HDAA HDAB HDAC | HEL cell line | pSport 1 | LP10 |
| HABA | Human Astrocyte | pSport 1 | LP10 |
| HUFA HUFB HUFC | Ulcerative Colitis | pSport 1 | LP10 |
| HNTM | NTERA2 + retinoic acid, 14 days | pSport 1 | LP10 |
| HDQA | Primary Dendritic | pSport 1 | LP10 |
| | cells, CapFinder2, frac 1 | | |
| HDQM | Primary Dendritic Cells, | pSport 1 | LP10 |
| | CapFinder, frac 2 | | |
| HLDX | Human Liver, normal, CapFinder | pSport 1 | LP10 |
| HULA HULB HULC | Human Dermal Endothelial | pSport1 | LP10 |
| | Cells, untreated | | |
| HUMA | Human Dermal Endothelial | pSport1 | LP10 |
| | cells, treated | | |
| HCJA | Human Stromal Endometrial | pSport1 | LP10 |
| | fibroblasts, untreated | | |
| HCJM | Human Stromal endometrial | pSport1 | LP10 |
| | fibroblasts, treated w/ estradiol | | |
| HEDA | Human Stromal endometrial | pSport1 | LP10 |
| | fibroblasts, treated with | | |
| | progesterone | | |
| HFNA | Human ovary tumor cell | pSport1 | LP10 |
| | OV350721 | | |
| HKGA HKGB HKGC HKGD | Merkel Cells | pSport1 | LP10 |
| HISA HISB HISC | Pancreas Islet Cell Tumor | pSport1 | LP10 |
| HLSA | Skin, burned | pSport1 | LP10 |
| HBZA | Prostate, BPH, Lib 2 | pSport 1 | LP10 |
| HBZS | Prostate BPH, Lib 2, subtracted | pSport 1 | LP10 |
| HFIA HFIB HFIC | Synovial Fibroblasts (control) | pSport 1 | LP10 |
| HFIH HFII HFIJ | Synovial hypoxia | pSport 1 | LP10 |
| HFIT HFIU HFIV | Synovial IL-1/TNF stimulated | pSport 1 | LP10 |
| HGCA | Messangial cell, frac 1 | pSport1 | LP10 |
| HMVA HMVB HMVC | Bone Marrow Stromal Cell, | pSport1 | LP10 |
| | untreated | | |
| HFIX HFIY HFIZ | Synovial Fibroblasts (Il1/TNF), | pSport1 | LP10 |
| | subt | | |
| HFOX HFOY HFOZ | Synovial hypoxia-RSF subtracted | pSport1 | LP10 |
| HMQA HMQB HMQC | Human Activated Monocytes | Uni-ZAP XR | LP11 |
| HMQD | | | |
| HLIA HLIB HLIC | Human Liver | pCMVSport 1 | LP012 |
| HHBA HHBB HHBC HHBD | Human Heart | pCMVSport 1 | LP012 |
| HHBE | | | |
| HBBA HBBB | Human Brain | pCMVSport 1 | LP012 |
| HLJA HLJB HLJC HLJD | Human Lung | pCMVSport 1 | LP012 |
| HLJE | | | |
| HOGA HOGB HOGC | Ovarian Tumor | pCMVSport 2.0 | LP012 |
| HTJM | Human Tonsils, Lib 2 | pCMVSport 2.0 | LP012 |
| HAMF HAMG | KMH2 | pCMVSport 3.0 | LP012 |
| HAJA HAJB HAJC | L428 | pCMVSport 3.0 | LP012 |
| HWBA HWBB HWBC | Dendritic cells, pooled | pCMVSport 3.0 | LP012 |
| HWBD HWBE | | | |
| HWAA HWAB HWAC | Human Bone Marrow, treated | pCMVSport 3.0 | LP012 |
| HWAD HWAE | | | |
| HYAA HYAB HYAC | B Cell lymphoma | pCMVSport 3.0 | LP012 |
| HWHG HWHH HWHI | Healing groin wound, 6.5 hours | pCMVSport 3.0 | LP012 |
| | post incision | | |
| HWHP HWHQ HWHR | Healing groin wound; 7.5 hours | pCMVSport 3.0 | LP012 |
| | post incision | | |
| HARM | Healing groin wound - zero hr | pCMVSport 3.0 | LP012 |
| | post-incision (control) | | |
| HBIM | Olfactory epithelium; nasalcavity | pCMVSport 3.0 | LP012 |
| HWDA | Healing Abdomen wound; 70&90 | pCMVSport 3.0 | LP012 |
| | min post incision | | |
| HWEA | Healing Abdomen Wound; 15 days | pCMVSport 3.0 | LP012 |
| | post incision | | |
| HWJA | Healing Abdomen Wound; 21&29 | pCMVSport 3.0 | LP012 |
| | days | | |
| HNAL | Human Tongue, frac 2 | pSport1 | LP012 |
| HMJA | H. Meniingima, M6 | pSport1 | LP012 |
| HMKA HMKB HMKC | H. Meningima, M1 | pSport1 | LP012 |
| HMKD HMKE | | | |
| HOFA | Ovarian Tumor I, OV5232 | pSport1 | LP012 |
| HCFA HCFB HCFC HCFD | T-Cell PHA 16 hrs | pSport1 | LP012 |
| HCFL HCFM HCFN HCFO | T-Cell PHA 24 hrs | pSport1 | LP012 |
| HMMA HMMB HMMC | Spleen metastic melanoma | pSport1 | LP012 |
| HTDA | Human Tonsil, Lib 3 | pSport1 | LP012 |
| HDBA | Human Fetal Thymus | pSport1 | LP012 |
| HDUA | Pericardium | pSport1 | LP012 |
| HBZA | Prostate, BPH, Lib 2 | pSport1 | LP012 |
| HWCA | Larynx tumor | pSport1 | LP012 |
| HWKA | Normal lung | pSport1 | LP012 |
| HSMB | Bone marrow stroma, treated | pSport1 | LP012 |
| HBHM | Normal trachea | pSport1 | LP012 |
| HLFC | Human Larynx | pSport1 | LP012 |
| HLRB | Siebben Polyposis | pSport1 | LP012 |
| HNIA | Mammary Gland | pSport1 | LP012 |
| HNJB | Palate carcinoma | pSport1 | LP012 |
| HNKA | Palate normal | pSport1 | LP012 |
| HMZA | Pharynx carcinoma | pSport1 | LP012 |
| HABG | Cheek Carcinoma | pSport1 | LP012 |
| HMZM | Pharynx Carcinoma | pSport1 | LP012 |
| HDRM | Larynx Carcinoma | pSport1 | LP012 |
| HVAA | Pancreas normal PCA4 No | pSport1 | LP012 |
| HICA | Tongue carcinoma | pSport1 | LP012 |
| HUKA HUKB HUKC HUKD | Human Uterine Cancer | Lambda ZAP II | LP013 |
| HUKE | | | |
| HFFA | Human Fetal Brain, random | Lambda ZAP II | LP013 |
| | primed | | |
| HTUA | Activated T-cell labeled with 4- | Lambda ZAP II | LP013 |
| | thioluri | | |
| HBQA | Early Stage Human Brain, random | Lambda ZAP II | LP013 |
| | primed | | |
| HMEB | Human microvascular Endothelial | Lambda ZAP II | LP013 |
| | cells, fract. B | | |
| HUSH | Human Umbilical Vein | Lambda ZAP II | LP013 |
| | Endothelial cells, fract. A, re- | | |
| | excision | | |
| HLQC HLQD | Hepatocellular tumor, re-excision | Lambda ZAP II | LP013 |
| HTWJ HTWK HTWL | Resting T-cell, re-excision | Lambda ZAP II | LP013 |
| HF6S | Human Whole 6 week Old Embryo | pBluescript | LP013 |
| | (II), subt | | |
| HHPS | Human Hippocampus, subtracted | pBluescript | LP013 |
| HL1S | LNCAP, differential expression | pBluescript | LP013 |
| HLHS HLHT | Early Stage Human Lung, | pBluescript | LP013 |
| | Subtracted | | |
| HSUS | Supt cells, cyclohexamide treated, | pBluescript | LP013 |
| | subtracted | | |
| HSUT | Supt cells, cyclohexamide treated, | pBluescript | LP013 |
| | differentially expressed | | |
| HSDS | H. Striatum Depression, subtracted | pBluescript | LP013 |
| HPTZ | Human Pituitary, Subtracted VII | pBluescript | LP013 |
| HSDX | H. Striatum Depression, subt II | pBluescript | LP013 |
| HSDZ | H. Striatum Depression, subt | pBluescript | LP013 |
| HPBA HPBB HPBC HPBD | Human Pineal Gland | pBluescript SK− | LP013 |
| HPBE | | | |
| HRTA | Colorectal Tumor | pBluescript SK− | LP013 |
| HSBA HSBB HSBC HSBM | HSC172 cells | pBluescript SK− | LP013 |
| HJAA HJAB HJAC HJAD | Jurkat T-cell G1 phase | pBluescript SK− | LP013 |
| HJBA HJBB HJBC HJBD | Jurkat T-cell, S1 phase | pBluescript SK− | LP013 |
| HTNA HTNB | Human Thyroid | pBluescript SK− | LP013 |
| HAHA HAHB | Human Adult Heart | Uni-ZAP XR | LP013 |
| HE6A | Whole 6 week Old Embryo | Uni-ZAP XR | LP013 |
| HFCA HFCB HFCC HFCD | Human Fetal Brain | Uni-ZAP XR | LP013 |
| HFCE | | | |
| HFKC HFKD HFKE HFKF | Human Fetal Kidney | Uni-ZAP XR | LP013 |
| HFKG | | | |
| HGBA HGBD HGBE HGBF | Human Gall Bladder | Uni-ZAP XR | LP013 |
| HGBG | | | |
| HPRA HPRB HPRC HPRD | Human Prostate | Uni-ZAP XR | LP013 |
| HTEA HTEB HTEC HTED | Human Testes | Uni-ZAP XR | LP013 |
| HTEE | | | |
| HTTA HTTB HTTC HTTD | Human Testes Tumor | Uni-ZAP XR | LP013 |
| HTTE | | | |
| HYBA HYBB | Human Fetal Bone | Uni-ZAP XR | LP013 |
| HFLA | Human Fetal Liver | Uni-ZAP XR | LP013 |
| HHFB HHFC HHFD HHFE | Human Fetal Heart | Uni-ZAP XR | LP013 |
| HHFF | | | |
| HUVB HUVC HUVD HUVE | Human Umbilical Vein, End. | Uni-ZAP XR | LP013 |
| | remake | | |
| HTHB HTHC HTHD | Human Thymus | Uni-ZAP XR | LP013 |
| HSTA HSTB HSTC HSTD | Human Skin Tumor | Uni-ZAP XR | LP013 |
| HTAA HTAB HTAC HTAD | Human Activated T-cells | Uni-ZAP XR | LP013 |
| HTAE | | | |
| HFEA HFEB HFEC | Human Fetal Epithelium (skin) | Uni-ZAP XR | LP013 |
| HJPA HJPB HJPC HJPD | Human Jurkat Membrane Bound | Uni-ZAP XR | LP013 |
| | Polysomes | | |
| HESA | Human Epithelioid Sarcoma | Uni-ZAP XR | LP013 |
| HALS | Human Adult Liver, Subtracted | Uni-ZAP XR | LP013 |
| HFTA HFTB HFTC HFTD | Human Fetal Dura Mater | Uni-ZAP XR | LP013 |
| HCAA HCAB HCAC | Cem cells, cyclohexamide treated | Uni-ZAP XR | LP013 |
| HRGA HRGB HRGC HRGD | Raji Cells, cyclohexamide treated | Uni-ZAP XR | LP013 |
| HE9A HE9B HE9C HE9D | Nine Week Old Early Stage | Uni-ZAP XR | LP013 |
| HE9E | Human | | |
| HSFA | Human Fibrosarcoma | Uni-ZAP XR | LP013 |
| HATA HATB HATC HATD | Human Adrenal Gland Tumor | Uni-ZAP XR | LP013 |
| HATE | | | |
| HTRA | Human Trachea Tumor | Uni-ZAP XR | LP013 |
| HE2A HE2D HE2E HE2H | 12 Week Old Early Stage Human | Uni-ZAP XR | LP013 |
| HE2I | | | |
| HE2B HE2C HE2F HE2G | 12 Week Old Early Stage Human, | Uni-ZAP XR | LP013 |
| HE2P | II | | |
| HNEA HNEB HNEC HNED | Human Neutrophil | Uni-ZAP XR | LP013 |
| HNEE | | | |
| HBGA | Human Primary Breast Cancer | Uni-ZAP XR | LP013 |
| HPTS HPTT HPTU | Human Pituitary, subtracted | Uni-ZAP XR | LP013 |
| HMQA HMQB HMQC | Human Activated Monocytes | Uni-ZAP XR | LP013 |
| HMQD | | | |
| HOAA HOAB HOAC | Human Osteosarcoma | Uni-ZAP XR | LP013 |
| HTOA HTOD HTOE HTOF | human tonsils | Uni-ZAP XR | LP013 |
| HTOG | | | |
| HMGB | Human OB MG63 control fraction I | Uni-ZAP XR | LP013 |
| HOPB | Human OB HOS control fraction I | Uni-ZAP XR | LP013 |
| HOQB | Human OB HOS treated (1 nM | Uni-ZAP XR | LP013 |
| | E2) fraction I | | |
| HAUA HAUB HAUC | Amniotic Cells - TNF induced | Uni-ZAP XR | LP013 |
| HAQA HAQB HAQC HAQD | Amniotic Cells - Primary Culture | Uni-ZAP XR | LP013 |
| HROA HROC | HUMAN STOMACH | Uni-ZAP XR | LP013 |
| HBJA HBJB HBJC HBJD | HUMAN B CELL LYMPHOMA | Uni-ZAP XR | LP013 |
| HBJE | | | |
| HODA HODB HODC HODD | human ovarian cancer | Uni-ZAP XR | LP013 |
| HCPA | Corpus Callosum | Uni-ZAP XR | LP013 |
| HSOA | stomach cancer (human) | Uni-ZAP XR | LP013 |
| HERA | SKIN | Uni-ZAP XR | LP013 |
| HMDA | Brain-medulloblastoma | Uni-ZAP XR | LP013 |
| HGLA HGLB HGLD | Glioblastoma | Uni-ZAP XR | LP013 |
| HWTA HWTB HWTC | wilm's tumor | Uni-ZAP XR | LP013 |
| HEAA | H. Atrophic Endometrium | Uni-ZAP XR | LP013 |
| HAPN HAPO HAPP HAPQ | Human Adult Pulmonary; re- | Uni-ZAP XR | LP013 |
| HAPR | excision | | |
| HLTG HLTH | Human T-cell lymphoma; re- | Uni-ZAP XR | LP013 |
| | excision | | |
| HAHC HAHD HAHE | Human Adult Heart; re-excision | Uni-ZAP XR | LP013 |
| HAGA HAGB HAGC HAGD | Human Amygdala | Uni-ZAP XR | LP013 |
| HAGE | | | |
| HSJA HSJB HSJC | Smooth muscle-ILb induced | Uni-ZAP XR | LP013 |
| HSHA HSHB HSHC | Smooth muscle, IL1b induced | Uni-ZAP XR | LP013 |
| HPWA HPWB HPWC | Prostate BPH | Uni-ZAP XR | LP013 |
| HPWD HPWE | | | |
| HPIA HPIB HPIC | LNCAP prostate cell line | Uni-ZAP XR | LP013 |
| HPJA HPJB HPJC | PC3 Prostate cell line | Uni-ZAP XR | LP013 |
| HBTA | Bone Marrow Stroma, TNF&LPS | Uni-ZAP XR | LP013 |
| | ind | | |
| HMCF HMCG HMCH HMCI | Macrophage-oxLDL; re-excision | Uni-ZAP XR | LP013 |
| HMCJ | | | |
| HAGG HAGH HAGI | Human Amygdala; re-excision | Uni-ZAP XR | LP013 |
| HACA | H. Adipose Tissue | Uni-ZAP XR | LP013 |
| HKFB | K562 + PMA (36 hrs), re-excision | ZAP Express | LP013 |
| HCWT HCWU HCWV | CD34 positive cells (cord | ZAP Express | LP013 |
| | blood), re-ex | | |
| HBWA | Whole brain | ZAP Express | LP013 |
| HBXA HBXB HBXC HBXD | Human Whole Brain #2 - Oligo dT | ZAP Express | LP013 |
| | >1.5 Kb | | |
| HAVM | Temporal cortex-Alzheizmer | pT-Adv | LP014 |
| HAVT | Hippocampus, Alzheimer | pT-Adv | LP014 |
| | Subtracted | | |
| HHAS | CHME Cell Line | Uni-ZAP XR | LP014 |
| HAJR | Larynx normal | pSport 1 | LP014 |
| HWLE HWLF HWLG | Colon Normal | pSport 1 | LP014 |
| HWLH | | | |
| HCRM HCRN HCRO | Colon Carcinoma | pSport 1 | LP014 |
| HWLI HWLJ HWLK | Colon Normal | pSport 1 | LP014 |
| HWLQ HWLR HWLS | Colon Tumor | pSport 1 | LP014 |
| HWLT | | | |
| HBFM | Gastrocnemius Muscle | pSport 1 | LP014 |
| HBOD HBOE | Quadriceps Muscle | pSport 1 | LP014 |
| HBKD HBKE | Soleus Muscle | pSport 1 | LP014 |
| HCCM | Pancreatic Langerhans | pSport 1 | LP014 |
| HWGA | Larynx carcinoma | pSport 1 | LP014 |
| HWGM HWGN | Larynx carcinoma | pSport 1 | LP014 |
| HWLA HWLB HWLC | Normal colon | pSport 1 | LP014 |
| HWLM HWLN | Colon Tumor | pSport 1 | LP014 |
| HVAM HVAN HVAO | Pancreas Tumor | pSport 1 | LP014 |
| HWGQ | Larynx carcinoma | pSport 1 | LP014 |
| HAQM HAQN | Salivary Gland | pSport 1 | LP014 |
| HASM | Stomach; normal | pSport 1 | LP014 |
| HBCM | Uterus; normal | pSport 1 | LP014 |
| HCDM | Testis; normal | pSport 1 | LP014 |
| HDJM | Brain; normal | pSport 1 | LP014 |
| HEFM | Adrenal Gland, normal | pSport 1 | LP014 |
| HBAA | Rectum normal | pSport 1 | LP014 |
| HFDM | Rectum tumour | pSport 1 | LP014 |
| HGAM | Colon, normal | pSport 1 | LP014 |
| HTMM | Colon, tumour | pSport 1 | LP014 |
| HCLB HCLC | Human Lung Cancer | Lambda Zap II | LP015 |
| HRLA | L1 Cell line | ZAP Express | LP015 |
| HHAM | Hypothalamus, Alzheimer's | pCMVSport 3.0 | LP015 |
| HKBA | Ku 812F Basophils Line | pSport 1 | LP015 |
| HS2S | Saos2, Dexamethosome Treated | pSport 1 | LP016 |
| HA5A | Lung Carcinoma A549 TNFalpha | pSport 1 | LP016 |
| | activated | | |
| HTFM | TF-1 Cell Line GM-CSF Treated | pSport 1 | LP016 |
| HYAS | Thyroid Tumour | pSport 1 | LP016 |
| HUTS | Larynx Normal | pSport 1 | LP016 |
| HXOA | Larynx Tumor | pSport 1 | LP016 |
| HEAH | Ea.hy.926 cell line | pSport 1 | LP016 |
| HINA | Adenocarcinoma Human | pSport 1 | LP016 |
| HRMA | Lung Mesothelium | pSport 1 | LP016 |
| HLCL | Human Pre-Differentiated | Uni-Zap XR | LP017 |
| | Adipocytes | | |
| HS2A | Saos2 Cells | pSport 1 | LP020 |
| HS2I | Saos2 Cells; Vitamin D3 Treated | pSport 1 | LP020 |
| HUCM | CHME Cell Line, untreated | pSport 1 | LP020 |
| HEPN | Aryepiglottis Normal | pSport 1 | LP020 |
| HPSN | Sinus Piniformis Tumour | pSport 1 | LP020 |
| HNSA | Stomach Normal | pSport 1 | LP020 |
| HNSM | Stomach Tumour | pSport 1 | LP020 |
| HNLA | Liver Normal Met5No | pSport 1 | LP020 |
| HUTA | Liver Tumour Met 5 Tu | pSport 1 | LP020 |
| HOCN | Colon Normal | pSport 1 | LP020 |
| HOCT | Colon Tumor | pSport 1 | LP020 |
| HTNT | Tongue Tumour | pSport 1 | LP020 |
| HLXN | Larynx Normal | pSport 1 | LP020 |
| HLXT | Larynx Tumour | pSport 1 | LP020 |
| HTYN | Thymus | pSport 1 | LP020 |
| HPLN | Placenta | pSport 1 | LP020 |
| HTNG | Tongue Normal | pSport 1 | LP020 |
| HZAA | Thyroid Normal (SDCA2 No) | pSport 1 | LP020 |
| HWES | Thyroid Thyroiditis | pSport 1 | LP020 |
| HFHD | Ficolled Human Stromal Cells, | pTrip1Ex2 | LP021 |
| | 5Fu treated | | |
| HFHM, HFHN | Ficolled Human Stromal Cells, | pTrip1Ex2 | LP021 |
| | Untreated | | |
| HPCI | Hep G2 Cells, lambda library | lambda Zap- | LP021 |
| | | CMV XR | |
| HBCA, HBCB, HBCC | H. Lymph node breast Cancer | Uni-ZAP XR | LP021 |
| HCOK | Chondrocytes | pSPORT1 | LP022 |
| HDCA, HDCB, HDCC | Dendritic Cells From CD34 Cells | pSPORT1 | LP022 |
| HDMA, HDMB | CD40 activated monocyte | pSPORT1 | LP022 |
| | dendritic cells | | |
| HDDM, HDDN, HDDO | LPS activated derived dendritic | pSPORT1 | LP022 |
| | cells | | |
| HPCR | Hep G2 Cells, PCR library | lambda Zap- | LP022 |
| | | CMV XR | |
| HAAA, HAAB, HAAC | Lung, Cancer (4005313A3): | pSPORT1 | LP022 |
| | Invasive Poorly Differentiated | | |
| | Lung Adenocarcinoma | | |
| HIPA, HIPB, HIPC | Lung, Cancer (4005163 B7): | pSPORT1 | LP022 |
| | Invasive, Poorly Diff. | | |
| | Adenocarcinoma, Metastatic | | |
| HOOH, HOOI | Ovary, Cancer: (4004562 B6) | pSPORT1 | LP022 |
| | Papillary Serous Cystic Neoplasm, | | |
| | Low Malignant Pot | | |
| HIDA | Lung, Normal: (4005313 B1) | pSPORT1 | LP022 |
| HUJA, HUJB, HUJC, HUJD, HUJE | B-Cells | pCMVSport 3.0 | LP022 |
| HNOA, HNOB, HNOC, HNOD | Ovary, Normal: (9805C040R) | pSPORT1 | LP022 |
| HNLM | Lung, Normal: (4005313 B1) | pSPORT1 | LP022 |
| HSCL | Stromal Cells | pSPORT1 | LP022 |
| HAAX | Lung, Cancer: (4005313 A3) | pSPORT1 | LP022 |
| | Invasive Poorly-differentiated | | |
| | Metastatic lung adenocarcinoma | | |
| HUUA, HUUB, HUUC, HUUD | B-cells (unstimulated) | pTrip1Ex2 | LP022 |
| HWWA, HWWB, HWWC, HWWD, | B-cells (stimulated) | pSPORT1 | LP022 |
| HWWE, HWWF, HWWG | | | |
| HCCC | Colon, Cancer: (9808C064R) | pCMVSport 3.0 | LP023 |
| HPDO HPDP HPDQ HPDR | Ovary, Cancer (9809C332): Poorly | pSport 1 | LP023 |
| HPD | differentiated adenocarcinoma | | |
| HPCO HPCP HPCQ HPCT | Ovary, Cancer (15395A1F): Grade | pSport 1 | LP023 |
| | II Papillary Carcinoma | | |
| HOCM HOCO HOCP HOCQ | Ovary, Cancer: (15799A1F) | pSport 1 | LP023 |
| | Poorly differentiated carcinoma | | |
| HCBM HCBN HCBO | Breast, Cancer: (4004943 A5) | pSport 1 | LP023 |
| HNBT HNBU HNBV | Breast, Normal: (4005522B2) | pSport 1 | LP023 |
| HBCP HBCQ | Breast, Cancer: (4005522 A2) | pSport 1 | LP023 |
| HBCJ | Breast, Cancer: (9806C012R) | pSport 1 | LP023 |
| HSAM HSAN | Stromal cells 3.88 | pSport 1 | LP023 |
| HVCA HVCB HVCC HVCD | Ovary, Cancer: (4004332 A2) | pSport 1 | LP023 |
| HSCK HSEN HSEO | Stromal cells (HBM3.18) | pSport 1 | LP023 |
| HSCP HSCQ | stromal cell clone 2.5 | pSport 1 | LP023 |
| HUXA | Breast Cancer: (4005385 A2) | pSport 1 | LP023 |
| HCOM HCON HCOO HCOP | Ovary, Cancer (4004650 A3): | pSport 1 | LP023 |
| HCOQ | Well-Differentiated Micropapillary | | |
| | Serous Carcinoma | | |
| HBNM | Breast, Cancer: (9802C020E) | pSport 1 | LP023 |
| HVVA HVVB HVVC HVVD | Human Bone Marrow, treated | pSport 1 | LP023 |
| HVVE | | | |

[0753] Two nonlimiting examples are provided below for isolating a particular clone from the deposited sample of plasmid cDNAs cited for that clone in Table 7. First, a plasmid is directly isolated by screening the clones using a polynucleotide probe corresponding to the nucleotide sequence of SEQ ID NO:X.

[0754] Particularly, a specific polynucleotide with 30-40 nucleotides is synthesized using an Applied Biosystems DNA synthesizer according to the sequence reported. The oligonucleotide is labeled, for instance, with ³²P-γ-ATP using T4 polynucleotide kinase and purified according to routine methods. (E.g., Maniatis et al., Molecular Cloning: A Laboratory Manual, Cold Spring Harbor Press, Cold Spring, N.Y. (1982)). The plasmid mixture is transformed into a suitable host, as indicated above (such as XL-1 Blue (Stratagene)) using techniques known to those of skill in the art, such as those provided by the vector supplier or in related publications or patents cited above. The transformants are plated on 1.5% agar plates (containing the appropriate selection agent, e.g., ampicillin) to a density of about 150 transformants (colonies) per plate. These plates are screened using Nylon membranes according to routine methods for bacterial colony screening (e.g., Sambrook et al., Molecular Cloning: A Laboratory Manual, 2nd Edit., (1989), Cold Spring Harbor Laboratory Press, pages 1.93 to 1.104), or other techniques known to those of skill in the art.

[0755] Alternatively, two primers of 17-20 nucleotides derived from both ends of the nucleotide sequence of SEQ ID NO:X are synthesized and used to amplify the desired cDNA using the deposited cDNA plasmid as a template. The polymerase chain reaction is carried out under routine conditions, for instance, in 25 μl of reaction mixture with 0.5 ug of the above cDNA template. A convenient reaction mixture is 1.5-5 mM MgCl₂, 0.01% (w/v) gelatin, 20 μM each of dATP, dCTP, dGTP, dTTP, 25 pmol of each primer and 0.25 Unit of Taq polymerase. Thirty five cycles of PCR (denaturation at 94° C. for 1 min; annealing at 55° C. for 1 min; elongation at 72° C. for 1 min) are performed with a Perkin-Elmer Cetus automated thermal cycler. The amplified product is analyzed by agarose gel electrophoresis and the DNA band with expected molecular weight is excised and purified. The PCR product is verified to be the selected sequence by subcloning and sequencing the DNA product.

[0756] Several methods are available for the identification of the 5′ or 3′ non-coding portions of a gene which may not be present in the deposited clone. These methods include but are not limited to, filter probing, clone enrichment using specific probes, and protocols similar or identical to 5′ and 3′ “RACE” protocols which are well known in the art. For instance, a method similar to 5′ RACE is available for generating the missing 5′ end of a desired full-length transcript. (Fromont-Racine et al., Nucleic Acids Res. 21(7):1683-1684 (1993)).

[0757] Briefly, a specific RNA oligonucleotide is ligated to the 5′ ends of a population of RNA presumably containing full-length gene RNA transcripts. A primer set containing a primer specific to the ligated RNA oligonucleotide and a primer specific to a known sequence of the gene of interest is used to PCR amplify the 5′ portion of the desired full-length gene. This amplified product may then be sequenced and used to generate the full length gene.

[0758] This above method starts with total RNA isolated from the desired source, although poly-A+ RNA can be used. The RNA preparation can then be treated with phosphatase if necessary to eliminate 5′ phosphate groups on degraded or damaged RNA which may interfere with the later RNA ligase step. The phosphatase should then be inactivated and the RNA treated with tobacco acid pyrophosphatase in order to remove the cap structure present at the 5′ ends of messenger RNAs. This reaction leaves a 5′ phosphate group at the 5′ end of the cap cleaved RNA which can then be ligated to an RNA oligonucleotide using T4 RNA ligase.

[0759] This modified RNA preparation is used as a template for first strand cDNA synthesis using a gene specific oligonucleotide. The first strand synthesis reaction is used as a template for PCR amplification of the desired 5′ end using a primer specific to the ligated RNA oligonucleotide and a primer specific to the known sequence of the gene of interest. The resultant product is then sequenced and analyzed to confirm that the 5′ end sequence belongs to the desired gene.

### Example 2

### Isolation of Genomic Clones Corresponding to a Polynucleotide

[0760] A human genomic P1 library (Genomic Systems, Inc.) is screened by PCR using primers selected for the sequence corresponding to SEQ ID NO:X according to the method described in Example 1. (See also, Sambrook.)

### Example 3

### Tissue Specific Expression Analysis

[0761] The Human Genome Sciences, Inc. (HGS) database is derived from sequencing tissue and/or disease specific cDNA libraries. Libraries generated from a particular tissue are selected and the specific tissue expression pattern of EST groups or assembled contigs within these libraries is determined by comparison of the expression patterns of those groups or contigs within the entire database. ESTs and assembled contigs which show tissue specific expression are selected.

[0762] The original clone from which the specific EST sequence was generated, or in the case of an assembled contig, the clone from which the 5′ most EST sequence was generated, is obtained from the catalogued library of clones and the insert amplified by PCR using methods known in the art. The PCR product is denatured and then transferred in 96 or 384 well format to a nylon membrane (Schleicher and Scheull) generating an array filter of tissue specific clones. Housekeeping genes, maize genes, and known tissue specific genes are included on the filters. These targets can be used in signal normalization and to validate assay sensitivity. Additional targets are included to monitor probe length and specificity of hybridization.

[0763] Radioactively labeled hybridization probes are generated by first strand cDNA synthesis per the manufacturer's instructions (Life Technologies) from mRNA/RNA samples prepared from the specific tissue being analyzed (e.g., prostate, prostate cancer, ovarian, ovarian cancer, etc.). The hybridization probes are purified by gel exclusion chromatography, quantitated, and hybridized with the array filters in hybridization bottles at 65° C. overnight. The filters are washed under stringent conditions and signals are captured using a Fuji phosphorimager.

[0764] Data is extracted using AIS software and following background subtraction, signal normalization is performed. This includes a normalization of filter-wide expression levels between different experimental runs. Genes that are differentially expressed in the tissue of interest are identified.

### Example 4

### Chromosomal Mapping of the Polynucleotides

[0765] An oligonucleotide primer set is designed according to the sequence at the 5′ end of SEQ ID NO:X. This primer preferably spans about 100 nucleotides. This primer set is then used in a polymerase chain reaction under the following set of conditions: 30 seconds, 95° C.; 1 minute, 56° C.; 1 minute, 70° C. This cycle is repeated 32 times followed by one 5 minute cycle at 70° C. Human, mouse, and hamster DNA is used as template in addition to a somatic cell hybrid panel containing individual chromosomes or chromosome fragments (Bios, Inc). The reactions are analyzed on either 8% polyacrylamide gels or 3.5% agarose gels. Chromosome mapping is determined by the presence of an approximately 100 bp PCR fragment in the particular somatic cell hybrid.

### Example 5

### Bacterial Expression of a Polypeptide

[0766] A polynucleotide encoding a polypeptide of the present invention is amplified using PCR oligonucleotide primers corresponding to the 5′ and 3′ ends of the DNA sequence, as outlined in Example 1, to synthesize insertion fragments. The primers used to amplify the cDNA insert should preferably contain restriction sites, such as BamHI and XbaI, at the 5′ end of the primers in order to clone the amplified product into the expression vector. For example, BamHI and XbaI correspond to the restriction enzyme sites on the bacterial expression vector pQE-9. (Qiagen, Inc., Chatsworth, Calif.). This plasmid vector encodes antibiotic resistance (Amp^{r}), a bacterial origin of replication (ori), an IPTG-regulatable promoter/operator (P/O), a ribosome binding site (RBS), a 6-histidine tag (6-His), and restriction enzyme cloning sites.

[0767] The pQE-9 vector is digested with BamHI and XbaI and the amplified fragment is ligated into the pQE-9 vector maintaining the reading frame initiated at the bacterial RBS. The ligation mixture is then used to transform the E. coli strain M15/rep4 (Qiagen, Inc.) which contains multiple copies of the plasmid pREP4, which expresses the lacI repressor and also confers kanamycin resistance (Kan^{r}). Transformants are identified by their ability to grow on LB plates and ampicillin/kanamycin resistant colonies are selected. Plasmid DNA is isolated and confirmed by restriction analysis.

[0768] Clones containing the desired constructs are grown overnight (O/N) in liquid culture in LB media supplemented with both Amp (100 ug/ml) and Kan (25 ug/ml). The O/N culture is used to inoculate a large culture at a ratio of 1:100 to 1:250. The cells are grown to an optical density 600 (O.D.⁶⁰⁰) of between 0.4 and 0.6. IPTG (Isopropyl-B-D-thiogalacto pyranoside) is then added to a final concentration of 1 mM. IPTG induces by inactivating the lacI repressor, clearing the P/O leading to increased gene expression.

[0769] Cells are grown for an extra 3 to 4 hours. Cells are then harvested by centrifugation (20 mins at 6000×g). The cell pellet is solubilized in the chaotropic agent 6 Molar Guanidine HCl by stirring for 3-4 hours at 4° C. The cell debris is removed by centrifugation, and the supernatant containing the polypeptide is loaded onto a nickel-nitrilo-tri-acetic acid (“Ni-NTA”) affinity resin column (available from QIAGEN, Inc., supra). Proteins with a 6×His tag bind to the Ni-NTA resin with high affinity and can be purified in a simple one-step procedure (for details see: The QIAexpressionist (1995) QIAGEN, Inc., supra).

[0770] Briefly, the supernatant is loaded onto the column in 6 M guanidine-HCl, pH 8. The column is first washed with 10 volumes of 6 M guanidine-HCl, pH 8, then washed with 10 volumes of 6 M guanidine-HCl pH 6, and finally the polypeptide is eluted with 6 M guanidine-HCl, pH 5.

[0771] The purified protein is then renatured by dialyzing it against phosphate-buffered saline (PBS) or 50 mM Na-acetate, pH 6 buffer plus 200 mM NaCl. Alternatively, the protein can be successfully refolded while immobilized on the Ni-NTA column. The recommended conditions are as follows: renature using a linear 6M-1M urea gradient in 500 mM NaCl, 20% glycerol, 20 mM Tris/HCl pH 7.4, containing protease inhibitors. The renaturation should be performed over a period of 1.5 hours or more. After renaturation the proteins are eluted by the addition of 250 mM immidazole. Immidazole is removed by a final dialyzing step against PBS or 50 mM sodium acetate pH 6 buffer plus 200 mM NaCl. The purified protein is stored at 4° C. or frozen at −80° C.

[0772] In addition to the above expression vector, the present invention further includes an expression vector, called pHE4a (ATCC Accession Number 209645, deposited on Feb. 25, 1998) which contains phage operator and promoter elements operatively linked to a polynucleotide of the present invention, called pHE4a. (ATCC Accession Number 209645, deposited on Feb. 25, 1998.) This vector contains: 1) a neomycinphosphotransferase gene as a selection marker, 2) an E. coli origin of replication, 3) a T5 phage promoter sequence, 4) two lac operator sequences, 5) a Shine-Delgarno sequence, and 6) the lactose operon repressor gene (lacIq). The origin of replication (oriC) is derived from pUC19 (LTI, Gaithersburg, Md.). The promoter and operator sequences are made synthetically.

[0773] DNA can be inserted into the pHFE4a by restricting the vector with NdeI and XbaI, BamHI, XhoI, or Asp718, running the restricted product on a gel, and isolating the larger fragment (the stuffer fragment should be about 310 base pairs). The DNA insert is generated according to the PCR protocol described in Example 1, using PCR primers having restriction sites for NdeI (5′ primer) and XbaI, BamHI, XhoI, or Asp718 (3′ primer). The PCR insert is gel purified and restricted with compatible enzymes. The insert and vector are ligated according to standard protocols.

[0774] The engineered vector could easily be substituted in the above protocol to express protein in a bacterial system.

### Example 6

### Purification of a Polypeptide from an Inclusion Body

[0775] The following alternative method can be used to purify a polypeptide expressed in E coli when it is present in the form of inclusion bodies. Unless otherwise specified, all of the following steps are conducted at 4-10° C.

[0776] Upon completion of the production phase of the E. coli fermentation, the cell culture is cooled to 4-10° C. and the cells harvested by continuous centrifugation at 15,000 rpm (Heraeus Sepatech). On the basis of the expected yield of protein per unit weight of cell paste and the amount of purified protein required, an appropriate amount of cell paste, by weight, is suspended in a buffer solution containing 100 mM Tris, 50 mM EDTA, pH 7.4. The cells are dispersed to a homogeneous suspension using a high shear mixer.

[0777] The cells are then lysed by passing the solution through a microfluidizer (Microfuidics, Corp. or APV Gaulin, Inc.) twice at 4000-6000 psi. The homogenate is then mixed with NaCl solution to a final concentration of 0.5 M NaCl, followed by centrifugation at 7000×g for 15 min. The resultant pellet is washed again using 0.5M NaCl, 100 mM Tris, 50 mM EDTA, pH 7.4.

[0778] The resulting washed inclusion bodies are solubilized with 1.5 M guanidine hydrochloride (GuHCl) for 2-4 hours. After 7000×g centrifugation for 15 min., the pellet is discarded and the polypeptide containing supernatant is incubated at 4° C. overnight to allow further GuHCl extraction.

[0779] Following high speed centrifugation (30,000×g) to remove insoluble particles, the GuHCl solubilized protein is refolded by quickly mixing the GuHCl extract with 20 volumes of buffer containing 50 mM sodium, pH 4.5, 150 mM NaCl, 2 mM EDTA by vigorous stirring. The refolded diluted protein solution is kept at 4° C. without mixing for 12 hours prior to further purification steps.

[0780] To clarify the refolded polypeptide solution, a previously prepared tangential filtration unit equipped with 0.16 μm membrane filter with appropriate surface area (e.g., Filtron), equilibrated with 40 mM sodium acetate, pH 6.0 is employed. The filtered sample is loaded onto a cation exchange resin (e.g., Poros HS-50, Perseptive Biosystems). The column is washed with 40 mM sodium acetate, pH 6.0 and eluted with 250 mM, 500 mM, 1000 mM, and 1500 mM NaCl in the same buffer, in a stepwise manner. The absorbance at 280 nm of the effluent is continuously monitored. Fractions are collected and further analyzed by SDS-PAGE.

[0781] Fractions containing the polypeptide are then pooled and mixed with 4 volumes of water. The diluted sample is then loaded onto a previously prepared set of tandem columns of strong anion (Poros HQ-50, Perseptive Biosystems) and weak anion (Poros CM-20, Perseptive Biosystems) exchange resins. The columns are equilibrated with 40 mM sodium acetate, pH 6.0. Both columns are washed with 40 mM sodium acetate, pH 6.0, 200 mM NaCl. The CM-20 column is then eluted using a 10 column volume linear gradient ranging from 0.2 M NaCl, 50 mM sodium acetate, pH 6.0 to 1.0 M NaCl, 50 mM sodium acetate, pH 6.5. Fractions are collected under constant A₂₈₀ monitoring of the effluent. Fractions containing the polypeptide (determined, for instance, by 16% SDS-PAGE) are then pooled.

[0782] The resultant polypeptide should exhibit greater than 95% purity after the above refolding and purification steps. No major contaminant bands should be observed from Commassie blue stained 16% SDS-PAGE gel when 5 μg of purified protein is loaded. The purified protein can also be tested for endotoxin/LPS contamination, and typically the LPS content is less than 0.1 ng/ml according to LAL assays.

### Example 7

### Cloning and Expression of a Polypeptide in a Baculovirus Expression System

[0783] In this example, the plasmid shuttle vector pA2 is used to insert a polynucleotide into a baculovirus to express a polypeptide. This expression vector contains the strong polyhedrin promoter of the Autographa californica nuclear polyhedrosis virus (AcMNPV) followed by convenient restriction sites such as BamHI, Xba I and Asp718. The polyadenylation site of the simian virus 40 (“SV40”) is used for efficient polyadenylation. For easy selection of recombinant virus, the plasmid contains the beta-galactosidase gene from E. coli under control of a weak Drosophila promoter in the same orientation, followed by the polyadenylation signal of the polyhedrin gene. The inserted genes are flanked on both sides by viral sequences for cell-mediated homologous recombination with wild-type viral DNA to generate a viable virus that express the cloned polynucleotide.

[0784] Many other baculovirus vectors can be used in place of the vector above, such as pAc373, pVL941, and pAcIM1, as one skilled in the art would readily appreciate, as long as the construct provides appropriately located signals for transcription, translation, secretion and the like, including a signal peptide and an in-frame AUG as required. Such vectors are described, for instance, in Luckow et al., Virology 170:31-39 (1989).

[0785] Specifically, the cDNA sequence contained in the deposited clone, including the AUG initiation codon, is amplified using the PCR protocol described in Example 1. If a naturally occurring signal sequence is used to produce the polypeptide of the present invention, the pA2 vector does not need a second signal peptide. Alternatively, the vector can be modified (pA2 GP) to include a baculovirus leader sequence, using the standard methods described in Summers et al., “A Manual of Methods for Baculovirus Vectors and Insect Cell Culture Procedures,” Texas Agricultural Experimental Station Bulletin No. 1555 (1987).

[0786] The amplified fragment is isolated from a 1% agarose gel using a commercially available kit (“Geneclean,” BIO 101 Inc., La Jolla, Calif.). The fragment then is digested with appropriate restriction enzymes and again purified on a 1% agarose gel.

[0787] The plasmid is digested with the corresponding restriction enzymes and optionally, can be dephosphorylated using calf intestinal phosphatase, using routine procedures known in the art. The DNA is then isolated from a 1% agarose gel using a commercially available kit (“Geneclean” BIO 101 Inc., La Jolla, Calif.).

[0788] The fragment and the dephosphorylated plasmid are ligated together with T4 DNA ligase. E. coli HB101 or other suitable E. coli hosts such as XL-1 Blue (Stratagene Cloning Systems, La Jolla, Calif.) cells are transformed with the ligation mixture and spread on culture plates. Bacteria containing the plasmid are identified by digesting DNA from individual colonies and analyzing the digestion product by gel electrophoresis. The sequence of the cloned fragment is confirmed by DNA sequencing.

[0789] Five μg of a plasmid containing the polynucleotide is co-transfected with 1.0 μg of a commercially available linearized baculovirus DNA (“BaculoGold™ baculovirus DNA, Pharmingen, San Diego, Calif.), using the lipofection method described by Felgner et al., Proc. Natl. Acad. Sci. USA 84:7413-7417 (1987). One μg of BaculoGold™ virus DNA and 5 μg of the plasmid are mixed in a sterile well of a microtiter plate containing 50 μl of serum-free Grace's medium (Life Technologies Inc., Gaithersburg, Md.). Afterwards, 10 μl Lipofectin plus 90 μl Grace's medium are added, mixed and incubated for 15 minutes at room temperature. Then the transfection mixture is added drop-wise to Sf9 insect cells (ATCC CRL 1711) seeded in a 35 mm tissue culture plate with 1 ml Grace's medium without serum. The plate is then incubated for 5 hours at 27° C. The transfection solution is then removed from the plate and 1 ml of Grace's insect medium supplemented with 10% fetal calf serum is added. Cultivation is then continued at 27° C. for four days.

[0790] After four days the supernatant is collected and a plaque assay is performed, as described by Summers and Smith, supra. An agarose gel with “Blue Gal” (Life Technologies Inc., Gaithersburg) is used to allow easy identification and isolation of gal-expressing clones, which produce blue-stained plaques. (A detailed description of a “plaque assay” of this type can also be found in the user's guide for insect cell culture and baculovirology distributed by Life Technologies Inc., Gaithersburg, page 9-10.) After appropriate incubation, blue stained plaques are picked with the tip of a micropipettor (e.g., Eppendorf). The agar containing the recombinant viruses is then resuspended in a microcentrifuge tube containing 200 μl of Grace's medium and the suspension containing the recombinant baculovirus is used to infect Sf9 cells seeded in 35 mm dishes. Four days later the supernatants of these culture dishes are harvested and then they are stored at 4° C.

[0791] To verify the expression of the polypeptide, Sf9 cells are grown in Grace's medium supplemented with 10% heat-inactivated FBS. The cells are infected with the recombinant baculovirus containing the polynucleotide at a multiplicity of infection (“MOI”) of about 2. If radiolabeled proteins are desired, 6 hours later the medium is removed and is replaced with SF900 II medium minus methionine and cysteine (available from Life Technologies Inc., Rockville, Md.). After 42 hours, 5 μCi of ³⁵S-methionine and 5 μCi ³⁵S-cysteine (available from Amersham) are added. The cells are further incubated for 16 hours and then are harvested by centrifugation. The proteins in the supernatant as well as the intracellular proteins are analyzed by SDS-PAGE followed by autoradiography (if radiolabeled).

[0792] Microsequencing of the amino acid sequence of the amino terminus of purified protein may be used to determine the amino terminal sequence of the produced protein.

### Example 8

### Expression of a Polypeptide in Mammalian Cells

[0793] The polypeptide of the present invention can be expressed in a mammalian cell. A typical mammalian expression vector contains a promoter element, which mediates the initiation of transcription of mRNA, a protein coding sequence, and signals required for the termination of transcription and polyadenylation of the transcript. Additional elements include enhancers, Kozak sequences and intervening sequences flanked by donor and acceptor sites for RNA splicing. Highly efficient transcription is achieved with the early and late promoters from SV40, the long terminal repeats (LTRs) from Retroviruses, e.g., RSV, HTLVI, HIVI and the early promoter of the cytomegalovirus (CMV). However, cellular elements can also be used (e.g., the human actin promoter).

[0794] Suitable expression vectors for use in practicing the present invention include, for example, vectors such as pSVL and pMSG (Pharmacia, Uppsala, Sweden), pRSVcat (ATCC 37152), pSV2dhfr (ATCC 37146), pBC12MI (ATCC 67109), pCMVSport 2.0, and pCMVSport 3.0. Mammalian host cells that could be used include, human Hela, 293, H9 and Jurkat cells, mouse NIH3T3 and C127 cells, Cos 1, Cos 7 and CV1, quail QC1-3 cells, mouse L cells and Chinese hamster ovary (CHO) cells.

[0795] Alternatively, the polypeptide can be expressed in stable cell lines containing the polynucleotide integrated into a chromosome. The co-transfection with a selectable marker such as DHFR, gpt, neomycin, or hygromycin allows the identification and isolation of the transfected cells.

[0796] The transfected gene can also be amplified to express large amounts of the encoded protein. The DHFR (dihydrofolate reductase) marker is useful in developing cell lines that carry several hundred or even several thousand copies of the gene of interest. (See, e.g., Alt, F. W., et al., J. Biol. Chem. 253:1357-1370 (1978); Hamlin, J. L. and Ma, C., Biochem. et Biophys. Acta, 1097:107-143 (1990); Page, M. J. and Sydenham, M. A., Biotechnology 9:64-68 (1991)). Another useful selection marker is the enzyme glutamine synthase (GS) (Murphy et al., Biochem J. 227:277-279 (1991); Bebbington et al., Bio/Technology 10:169-175 (1992). Using these markers, the mammalian cells are grown in selective medium and the cells with the highest resistance are selected. These cell lines contain the amplified gene(s) integrated into a chromosome. Chinese hamster ovary (CHO) and NSO cells are often used for the production of proteins.

[0797] Derivatives of the plasmid pSV2-dhfr (ATCC Accession No. 37146), the expression vectors pC4 (ATCC Accession No. 209646) and pC6 (ATCC Accession No. 209647) contain the strong promoter (LTR) of the Rous Sarcoma Virus (Cullen et al., Molecular and Cellular Biology, 438-447 (March, 1985)) plus a fragment of the CMV-enhancer (Boshart et al., Cell 41:521-530 (1985)). Multiple cloning sites, e.g., with the restriction enzyme cleavage sites BamHI, XbaI and Asp718, facilitate the cloning of the gene of interest. The vectors also contain the 3′ intron, the polyadenylation and termination signal of the rat preproinsulin gene, and the mouse DHFR gene under control of the SV40 early promoter.

[0798] Specifically, the plasmid pC6, for example, is digested with appropriate restriction enzymes and then dephosphorylated using calf intestinal phosphates by procedures known in the art. The vector is then isolated from a 1% agarose gel.

[0799] A polynucleotide of the present invention is amplified according to the protocol outlined in Example 1. If a naturally occurring signal sequence is used to produce the polypeptide of the present invention, the vector does not need a second signal peptide. Alternatively, if a naturally occurring signal sequence is not used, the vector can be modified to include a heterologous signal sequence. (See, e.g., International Publication No. WO 96/34891.)

[0800] The amplified fragment is isolated from a 1% agarose gel using a commercially available kit (“Geneclean,” BIO 101 Inc., La Jolla, Calif.). The fragment then is digested with appropriate restriction enzymes and again purified on a 1% agarose gel.

[0801] The amplified fragment is then digested with the same restriction enzyme and purified on a 1% agarose gel. The isolated fragment and the dephosphorylated vector are then ligated with T4 DNA ligase. E. coli HB101 or XL-1 Blue cells are then transformed and bacteria are identified that contain the fragment inserted into plasmid pC6 using, for instance, restriction enzyme analysis.

[0802] Chinese hamster ovary cells lacking an active DHFR gene is used for transfection. Five μg of the expression plasmid pC6 or pC4 is cotransfected with 0.5 μg of the plasmid pSVneo using lipofectin (Felgner et al., supra). The plasmid pSV2-neo contains a dominant selectable marker, the neo gene from Tn5 encoding an enzyme that confers resistance to a group of antibiotics including G418. The cells are seeded in alpha minus MEM supplemented with 1 mg/ml G418. After 2 days, the cells are trypsinized and seeded in hybridoma cloning plates (Greiner, Germany) in alpha minus MEM supplemented with 10, 25, or 50 ng/ml of methotrexate plus 1 mg/ml G418. After about 10-14 days single clones are trypsinized and then seeded in 6-well petri dishes or 10 ml flasks using different concentrations of methotrexate (50 nM, 100 nM, 200 nM, 400 nM, 800 nM). Clones growing at the highest concentrations of methotrexate are then transferred to new 6-well plates containing even higher concentrations of methotrexate (1 μM, 2 μM, 5 μM, 10 mM, 20 mM). The same procedure is repeated until clones are obtained which grow at a concentration of 100-200 μM. Expression of the desired gene product is analyzed, for instance, by SDS-PAGE and Western blot or by reversed phase HPLC analysis.

### Example 9

### Protein Fusions

[0803] The polypeptides of the present invention are preferably fused to other proteins. These fusion proteins can be used for a variety of applications. For example, fusion of the present polypeptides to His-tag, HA-tag, protein A, IgG domains, and maltose binding protein facilitates purification. (See Example 5; see also EP A 394,827; Traunecker, et al., Nature 331:84-86 (1988)). Similarly, fusion to IgG-1, IgG-3, and albumin increases the halflife time in vivo. Nuclear localization signals fused to the polypeptides of the present invention can target the protein to a specific subcellular localization, while covalent heterodimer or homodimers can increase or decrease the activity of a fusion protein. Fusion proteins can also create chimeric molecules having more than one function. Finally, fusion proteins can increase solubility and/or stability of the fused protein compared to the non-fused protein. All of the types of fusion proteins described above can be made by modifying the following protocol, which outlines the fusion of a polypeptide to an IgG molecule, or the protocol described in Example 5.

[0804] Briefly, the human Fc portion of the IgG molecule can be PCR amplified, using primers that span the 5′ and 3′ ends of the sequence described below. These primers also should have convenient restriction enzyme sites that will facilitate cloning into an expression vector, preferably a mammalian expression vector.

[0805] For example, if pC4 (ATCC Accession No. 209646) is used, the human Fc portion can be ligated into the BamHI cloning site. Note that the 3′ BamHI site should be destroyed. Next, the vector containing the human Fc portion is re-restricted with BamHI, linearizing the vector, and a polynucleotide of the present invention, isolated by the PCR protocol described in Example 1, is ligated into this BamHI site. Note that the polynucleotide is cloned without a stop codon, otherwise a fusion protein will not be produced.

[0806] If the naturally occurring signal sequence is used to produce the polypeptide of the present invention, pC4 does not need a second signal peptide. Alternatively, if the naturally occurring signal sequence is not used, the vector can be modified to include a heterologous signal sequence. (See, e.g., International Publication No. WO 96/34891.)

Human IgG Fc region:

| | |
|---|---|
| GGGATGCGGAGCCCAAATCTTCTGACAAAACTCACAC | (SEQ ID NO:1) |
| ATGCCCACCGTGGCCAGCACCTGAATTCGAGGGTGCA | |
| CCGTCAGTCTTCCTCTTCCCCCCAAAACCCAAGGACA | |
| CCCTGATGATCTCCCGGACTCCTGAGGTCACATGCGT | |
| GGTGGTGGACGTAAGCCACGAAGACCCTGAGGTCAAG | |
| TTCAACTGGTACGTGGACGGCGTGGAGGTGCATAATG | |
| CCAAGACAAAGCCGCGGGAGGAGCAGTACAACAGCAC | |
| GTACCGTGTGGTCAGCGTCCTCACCGTCCTGCACCAG | |
| GACTGGCTGAATGGCAAGGAGTACAAGTGCAAGGTCT | |
| CCAACAAAGCCCTCCCAACCCCCATCGAGAAAACCAT | |
| CTCCAAAGCCAAAGGGCAGCCCCGAGAACCACAGGTG | |
| TACACCCTGCCCCCATCCCGGGATGAGCTGACCAAGA | |
| ACCAGGTCAGCCTGACCTGCCTGGTCAAAGGCTTCTA | |
| TCCAAGCGACATCGCCGTGGAGTGGGAGAGCAATGGG | |
| CAGCCGGAGAAGAACTACAAGACCACGCCTCCCGTGC | |
| TGGACTCCGACGGCTCCTTCTTCCTCTACAGCAAGCT | |
| CACCGTGGACAAGAGCAGGTGGCAGCAGGGGAACGTC | |
| TTCTCATGCTCCGTGATGCATGAGGCTCTGCACAACC | |
| ACTACACGCAGAAGAGCCTCTCCCTGTCTCCGGGTAA | |
| ATGAGTGCGACGGCCGCGACTCTAGAGGAT | |

### Example 10

### Production of an Antibody from a Polypeptide

a) Hybridoma Technology

[0807] The antibodies of the present invention can be prepared by a variety of methods. (See, Current Protocols, Chapter 2.) As one example of such methods, cells expressing a polypeptide of the present invention are administered to an animal to induce the production of sera containing polyclonal antibodies. In a preferred method, a preparation of a polypeptide of the present invention is prepared and purified to render it substantially free of natural contaminants. Such a preparation is then introduced into an animal in order to produce polyclonal antisera of greater specific activity.

[0808] Monoclonal antibodies specific for a polypeptide of the present invention are prepared using hybridoma technology (Kohler et al., Nature 256:495 (1975); Kohler et al., Eur. J. Immunol. 6:511 (1976); Kohler et al., Eur. J. Immunol. 6:292 (1976); Hammerling et al., in: Monoclonal Antibodies and T-Cell Hybridomas, Elsevier, N.Y., pp. 563-681 (1981)). In general, an animal (preferably a mouse) is immunized with a polypeptide of the present invention or, more preferably, with a secreted polypeptide-expressing cell. Such polypeptide-expressing cells are cultured in any suitable tissue culture medium, preferably in Earle's modified Eagle's medium supplemented with 10% fetal bovine serum (inactivated at about 56° C.), and supplemented with about 10 g/l of nonessential amino acids, about 1,000 U/ml of penicillin, and about 100 μg/ml of streptomycin.

[0809] The splenocytes of such mice are extracted and fused with a suitable myeloma cell line. Any suitable myeloma cell line may be employed in accordance with the present invention; however, it is preferable to employ the parent myeloma cell line (SP2O), available from the ATCC. After fusion, the resulting hybridoma cells are selectively maintained in HAT medium, and then cloned by limiting dilution as described by Wands et al. (Gastroenterology 80:225-232 (1981)). The hybridoma cells obtained through such a selection are then assayed to identify clones which secrete antibodies capable of binding the polypeptide of the present invention.

[0810] Alternatively, additional antibodies capable of binding to a polypeptide of the present invention can be produced in a two-step procedure using anti-idiotypic antibodies. Such a method makes use of the fact that antibodies are themselves antigens, and therefore, it is possible to obtain an antibody which binds to a second antibody. In accordance with this method, protein specific antibodies are used to immunize an animal, preferably a mouse. The splenocytes of such an animal are then used to produce hybridoma cells, and the hybridoma cells are screened to identify clones which produce an antibody whose ability to bind to the polypeptide-specific antibody can be blocked by said polypeptide. Such antibodies comprise anti-idiotypic antibodies to the polypeptide-specific antibody and are used to immunize an animal to induce formation of further polypeptide-specific antibodies.

[0811] For in vivo use of antibodies in humans, an antibody is “humanized”. Such antibodies can be produced using genetic constructs derived from hybridoma cells producing the monoclonal antibodies described above. Methods for producing chimeric and humanized antibodies are known in the art and are discussed herein. (See, for review, Morrison, Science 229:1202 (1985); Oi et al., BioTechniques 4:214 (1986); Cabilly et al., U.S. Pat. No. 4,816,567; Taniguchi et al., EP 171496; Morrison et al., EP 173494; Neuberger et al., WO 8601533; Robinson et al., International Publication No. WO 8702671; Boulianne et al., Nature 312:643 (1984); Neuberger et al., Nature 314:268 (1985)).

b) Isolation of Antibody Fragments Directed Against a Polypeptide of the Present Invention from a Library of scFvs

[0812] Naturally occurring V-genes isolated from human PBLs are constructed into a library of antibody fragments which contain reactivities against a polypeptide of the present invention to which the donor may or may not have been exposed (see e.g., U.S. Pat. No. 5,885,793 incorporated herein by reference in its entirety).

[0813] Rescue of the Library. A library of scFvs is constructed from the RNA of human PBLs as described in International Publication No. WO 92/01047. To rescue phage displaying antibody fragments, approximately 10⁹ E. coli harboring the phagemid are used to inoculate 50 ml of 2×TY containing 1% glucose and 100 μg/ml of ampicillin (2×TY-AMP-GLU) and grown to an O.D. of 0.8 with shaking. Five ml of this culture is used to inoculate 50 ml of 2×TY-AMP-GLU, 2×108 TU of delta gene 3 helper (M13 delta gene III, see International Publication No. WO 92/01047) are added and the culture incubated at 37° C. for 45 minutes without shaking and then at 37° C. for 45 minutes with shaking. The culture is centrifuged at 4000 r.p.m. for 10 min. and the pellet resuspended in 2 liters of 2×TY containing 100 μg/ml ampicillin and 50 ug/ml kanamycin and grown overnight. Phage are prepared as described in International Publication No. WO 92/01047.

[0814] M13 delta gene III is prepared as follows: M13 delta gene III helper phage does not encode gene III protein, hence the phage(mid) displaying antibody fragments have a greater avidity of binding to antigen. Infectious M13 delta gene III particles are made by growing the helper phage in cells harboring a pUC19 derivative supplying the wild type gene III protein during phage morphogenesis. The culture is incubated for 1 hour at 37° C. without shaking and then for a further hour at 37° C. with shaking. Cells are spun down (IEC-Centra 8,400 r.p.m. for 10 min), resuspended in 300 ml 2×TY broth containing 100 μg ampicillin/ml and 25 μg kanamycin/ml (2×TY-AMP-KAN) and grown overnight, shaking at 37° C. Phage particles are purified and concentrated from the culture medium by two PEG-precipitations (Sambrook et al., 1990), resuspended in 2 ml PBS and passed through a 0.45 μm filter (Minisart NML; Sartorius) to give a final concentration of approximately 10¹³ transducing units/ml (ampicillin-resistant clones).

[0815] Panning of the Library. Immunotubes (Nunc) are coated overnight in PBS with 4 ml of either 100 μg/ml or 10 μg/ml of a polypeptide of the present invention. Tubes are blocked with 2% Marvel-PBS for 2 hours at 37° C. and then washed 3 times in PBS. Approximately 10¹³ TU of phage is applied to the tube and incubated for 30 minutes at room temperature tumbling on an over and under turntable and then left to stand for another 1.5 hours. Tubes are washed 10 times with PBS 0.1% Tween-20 and 10 times with PBS. Phage are eluted by adding 1 ml of 100 mM triethylamine and rotating 15 minutes on an under and over turntable after which the solution is immediately neutralized with 0.5 ml of 1.0M Tris-HCl, pH 7.4. Phage are then used to infect 10 ml of mid-log E. coli TG1 by incubating eluted phage with bacteria for 30 minutes at 37° C. The E. coli are then plated on TYE plates containing 1% glucose and 100 μg/ml ampicillin. The resulting bacterial library is then rescued with delta gene 3 helper phage as described above to prepare phage for a subsequent round of selection. This process is then repeated for a total of 4 rounds of affinity purification with tube-washing increased to 20 times with PBS, 0.1% Tween-20 and 20 times with PBS for rounds 3 and 4.

[0816] Characterization of Binders. Eluted phage from the 3rd and 4th rounds of selection are used to infect E. coli HB 2151 and soluble scFv is produced (Marks, et al., 1991) from single colonies for assay. ELISAs are performed with microtitre plates coated with either 10 pg/ml of the polypeptide of the present invention in 50 mM bicarbonate pH 9.6. Clones positive in ELISA are further characterized by PCR fingerprinting (see, e.g., International Publication No. WO 92/01047) and then by sequencing. These ELISA positive clones may also be further characterized by techniques known in the art, such as, for example, epitope mapping, binding affinity, receptor signal transduction, ability to block or competitively inhibit antibody/antigen binding, and competitive agonistic or antagonistic activity.

### Example 11

### Method of Determining Alterations in a Gene Corresponding to a Polynucleotide

[0817] RNA isolated from entire families or individual patients presenting with an allergic and/or asthmatic disease or disorder is isolated. cDNA is then generated from these RNA samples using protocols known in the art. (See, Sambrook.) The cDNA is then used as a template for PCR, employing primers surrounding regions of interest in SEQ ID NO:X; and/or the nucleotide sequence of the cDNA contained in ATCC Deposit No: Z. Suggested PCR conditions consist of 35 cycles at 95 degrees C. for 30 seconds; 60-120 seconds at 52-58 degrees C.; and 60-120 seconds at 70 degrees C., using buffer solutions described in Sidransky et al., Science 252:706 (1991).

[0818] PCR products are then sequenced using primers labeled at their 5′ end with T4 polynucleotide kinase, employing SequiTherm Polymerase (Epicentre Technologies). The intron-exon boundaries of selected exons is also determined and genomic PCR products analyzed to confirm the results. PCR products harboring suspected mutations are then cloned and sequenced to validate the results of the direct sequencing.

[0819] PCR products are cloned into T-tailed vectors as described in Holton et al., Nucleic Acids Research, 19:1156 (1991) and sequenced with T7 polymerase (United States Biochemical). Affected individuals are identified by mutations not present in unaffected individuals.

[0820] Genomic rearrangements are also observed as a method of determining alterations in a gene corresponding to a polynucleotide. Genomic clones isolated according to Example 2 are nick-translated with digoxigenindeoxy-uridine 5′-triphosphate (Boehringer Manheim), and FISH performed as described in Johnson et al., Methods Cell Biol. 35:73-99 (1991). Hybridization with the labeled probe is carried out using a vast excess of human cot-1 DNA for specific hybridization to the corresponding genomic locus.

[0821] Chromosomes are counterstained with 4,6-diamino-2-phenylidole and propidium iodide, producing a combination of C- and R-bands. Aligned images for precise mapping are obtained using a triple-band filter set (Chroma Technology, Brattleboro, Vt.) in combination with a cooled charge-coupled device camera (Photometrics, Tucson, Ariz.) and variable excitation wavelength filters. (Johnson et al., Genet. Anal. Tech. Appl., 8:75 (1991)). Image collection, analysis and chromosomal fractional length measurements are performed using the ISee Graphical Program System. (Inovision Corporation, Durham, N.C.) Chromosome alterations of the genomic region hybridized by the probe are identified as insertions, deletions, and translocations. These alterations are used as a diagnostic marker for an associated disease.

### Example 12

### Method of Detecting Abnormal Levels of a Polypeptide in a Biological Sample

[0822] A polypeptide of the present invention can be detected in a biological sample, and if an increased or decreased level of the polypeptide is detected, this polypeptide is a marker for a particular phenotype. Methods of detection are numerous, and thus, it is understood that one skilled in the art can modify the following assay to fit their particular needs.

[0823] For example, antibody-sandwich ELISAs are used to detect polypeptides in a sample, preferably a biological sample. Wells of a microtiter plate are coated with specific antibodies, at a final concentration of 0.2 to 10 ug/ml. The antibodies are either monoclonal or polyclonal and are produced by the method described in Example 10. The wells are blocked so that non-specific binding of the polypeptide to the well is reduced.

[0824] The coated wells are then incubated for >2 hours at RT with a sample containing the polypeptide. Preferably, serial dilutions of the sample should be used to validate results. The plates are then washed three times with deionized or distilled water to remove unbound polypeptide.

[0825] Next, 50 ul of specific antibody-alkaline phosphatase conjugate, at a concentration of 25-400 ng, is added and incubated for 2 hours at room temperature. The plates are again washed three times with deionized or distilled water to remove unbound conjugate.

[0826] Add 75 ul of 4-methylumbelliferyl phosphate (MUP) or p-nitrophenyl phosphate (NPP) substrate solution to each well and incubate 1 hour at room temperature. Measure the reaction by a microtiter plate reader. Prepare a standard curve, using serial dilutions of a control sample, and plot polypeptide concentration on the X-axis (log scale) and fluorescence or absorbance of the Y-axis (linear scale). Interpolate the concentration of the polypeptide in the sample using the standard curve.

### Example 13

### Formulation

[0827] The invention also provides methods of preventing, treating and/or ameliorating an allergic and/or asthmatic disease or disorder by administration to a subject of an effective amount of a Therapeutic. By therapeutic is meant polynucleotides or polypeptides of the invention (including fragments and variants), agonists or antagonists thereof, and/or antibodies thereto, in combination with a pharmaceutically acceptable carrier type (e.g., a sterile carrier).

[0828] The Therapeutic will be formulated and dosed in a fashion consistent with good medical practice, taking into account the clinical condition of the individual patient (especially the side effects of treatment with the Therapeutic alone), the site of delivery, the method of administration, the scheduling of administration, and other factors known to practitioners. The “effective amount” for purposes herein is thus determined by such considerations.

[0829] As a general proposition, the total pharmaceutically effective amount of the Therapeutic administered parenterally per dose will be in the range of about 1 ug/kg/day to 10 mg/kg/day of patient body weight, although, as noted above, this will be subject to therapeutic discretion. More preferably, this dose is at least 0.01 mg/kg/day, and most preferably for humans between about 0.01 and 1 mg/kg/day for the hormone. If given continuously, the Therapeutic is typically administered at a dose rate of about 1 ug/kg/hour to about 50 ug/kg/hour, either by 1-4 injections per day or by continuous subcutaneous infusions, for example, using a mini-pump. An intravenous bag solution may also be employed. The length of treatment needed to observe changes and the interval following treatment for responses to occur appears to vary depending on the desired effect.

[0830] Therapeutics can be are administered orally, rectally, parenterally, intracistemally, intravaginally, intraperitoneally, topically (as by powders, ointments, gels, drops or transdermal patch), bucally, or as an oral or nasal spray. “Pharmaceutically acceptable carrier” refers to a non-toxic solid, semisolid or liquid filler, diluent, encapsulating material or formulation auxiliary of any. The term “parenteral” as used herein refers to modes of administration which include intravenous, intramuscular, intraperitoneal, intrasternal, subcutaneous and intraarticular injection and infusion.

[0831] Therapeutics of the invention are also suitably administered by sustained-release systems. Suitable examples of sustained-release Therapeutics are administered orally, rectally, parenterally, intracistemally, intravaginally, intraperitoneally, topically (as by powders, ointments, gels, drops or transdermal patch), bucally, or as an oral or nasal spray. “Pharmaceutically acceptable carrier” refers to a non-toxic solid, semisolid or liquid filler, diluent, encapsulating material or formulation auxiliary of any type. The term “parenteral” as used herein refers to modes of administration which include intravenous, intramuscular, intraperitoneal, intrasternal, subcutaneous and intraarticular injection and infusion.

[0832] Therapeutics of the invention are also suitably administered by sustained-release systems. Suitable examples of sustained-release Therapeutics include suitable polymeric materials (such as, for example, semi-permeable polymer matrices in the form of shaped articles, e.g., films, or mirocapsules), suitable hydrophobic materials (for example as an emulsion in an acceptable oil) or ion exchange resins, and sparingly soluble derivatives (such as, for example, a sparingly soluble salt).

[0833] Sustained-release matrices include polylactides (U.S. Pat. No. 3,773,919, EP 58,481), copolymers of L-glutamic acid and gamma-ethyl-L-glutamate (Sidman et al., Biopolymers 22:547-556 (1983)), poly (2-hydroxyethyl methacrylate) (Langer et al., J. Biomed. Mater. Res. 15:167-277 (1981), and Langer, Chem. Tech. 12:98-105 (1982)), ethylene vinyl acetate (Langer et al., Id.) or poly-D-(−)-3-hydroxybutyric acid (EP 133,988).

[0834] In a preferred embodiment, polypeptide, polynucleotide, and antibody compositions of the invention are formulated in a biodegradable, polymeric drug delivery system, for example as described in U.S. Pat. Nos. 4,938,763; 5,278,201; 5,278,202; 5,324,519; 5,340,849; and 5,487,897 and in International Publication Numbers WO01/35929, WO00/24374, and WO00/06117 which are hereby incorporated by reference in their entirety. In specific preferred embodiments the polypeptide, polynucleotide, and antibody compositions of the invention are formulated using the ATRIGEL® Biodegradable System of Atrix Laboratories, Inc. (Fort Collins, Colo.).

[0835] Examples of biodegradable polymers which can be used in the formulation of polypeptide, polynucleotide, and antibody compositions, include but are not limited to, polylactides, polyglycolides, polycaprolactones, polyanhydrides, polyamides, polyurethanes, polyesteramides, polyorthoesters, polydioxanones, polyacetals, polyketals, polycarbonates, polyorthocarbonates, polyphosphazenes, polyhydroxybutyrates, polyhydroxyvalerates, polyalkylene oxalates, polyalkylene succinates, poly(malic acid), poly(amino acids), poly(methyl vinyl ether), poly(maleic anhydride), polyvinylpyrrolidone, polyethylene glycol, polyhydroxycellulose, chitin, chitosan, and copolymers, terpolymers, or combinations or mixtures of the above materials. The preferred polymers are those that have a lower degree of crystallization and are more hydrophobic. These polymers and copolymers are more soluble in the biocompatible solvents than the highly crystalline polymers such as polyglycolide and chitin which also have a high degree of hydrogen-bonding. Preferred materials with the desired solubility parameters are the polylactides, polycaprolactones, and copolymers of these with glycolide in which there are more amorphous regions to enhance solubility. In specific preferred embodiments, the biodegradable polymers which can be used in the formulation of polypeptide, polynucleotide, and antibody compositions are poly(lactide-co-glycolides). Polymer properties such as molecular weight, hydrophobicity, and lactide/glycolide ratio may be modified to obtain the desired polypeptide, polynucleotide, or antibody release profile (See, e.g., Ravivarapu et al., Journal of Pharmaceutical Sciences 89:732-741 (2000), which is hereby incorporated by reference in its entirety).

[0836] It is also preferred that the solvent for the biodegradable polymer be non-toxic, water miscible, and otherwise biocompatible. Examples of such solvents include, but are not limited to, N-methyl-2-pyrrolidone, 2-pyrrolidone, C2 to C6 alkanols, C1 to C15 alchohols, dils, triols, and tetraols such as ethanol, glycerine propylene glycol, butanol; C3 to C15 alkyl ketones such as acetone, diethyl ketone and methyl ethyl ketone; C3 to C15 esters such as methyl acetate, ethyl acetate, ethyl lactate; alkyl ketones such as methyl ethyl ketone, C1 to C15 amides such as dimethylformamide, dimethylacetamide and caprolactam; C3 to C20 ethers such as tetrahydrofuran, or solketal; tweens, triacetin, propylene carbonate, decylmethylsulfoxide, dimethyl sulfoxide, oleic acid, 1-dodecylazacycloheptan-2-one, Other preferred solvents are benzyl alchohol, benzyl benzoate, dipropylene glycol, tributyrin, ethyl oleate, glycerin, glycofural, isopropyl myristate, isopropyl palmitate, oleic acid, polyethylene glycol, propylene carbonate, and triethyl citrate. The most preferred solvents are N-methyl-2-pyrrolidone, 2-pyrrolidone, dimethyl sulfoxide, triacetin, and propylene carbonate because of the solvating ability and their compatibility.

[0837] Additionally, formulations comprising polypeptide, polynucleotide, and antibody compositions and a biodegradable polymer may also include release-rate modification agents and/or pore-forming agents. Examples of release-rate modification agents include, but are not limited to, fatty acids, triglycerides, other like hydrophobic compounds, organic solvents, plasticizing compounds and hydrophilic compounds. Suitable release rate modification agents include, for example, esters of mono-, di-, and tricarboxylic acids, such as 2-ethoxyethyl acetate, methyl acetate, ethyl acetate, diethyl phthalate, dimethyl phthalate, dibutyl phthalate, dimethyl adipate, dimethyl succinate, dimethyl oxalate, dimethyl citrate, triethyl citrate, acetyl tributyl citrate, acetyl triethyl citrate, glycerol triacetate, di(n-butyl)sebecate, and the like; polyhydroxy alcohols, such as propylene glycol, polyethylene glycol, glycerin, sorbitol, and the like; fatty acids; triesters of glycerol, such as triglycerides, epoxidized soybean oil, and other epoxidized vegetable oils; sterols, such as cholesterol; alcohols, such as C.sub.6-C.sub.12 alkanols, 2-ethoxyethanol. The release rate modification agent may be used singly or in combination with other such agents. Suitable combinations of release rate modification agents include, but are not limited to, glycerin/propylene glycol, sorbitol/glycerine, ethylene oxide/propylene oxide, butylene glycol/adipic acid, and the like. Preferred release rate modification agents include, but are not limited to, dimethyl citrate, triethyl citrate, ethyl heptanoate, glycerin, and hexanediol. Suitable pore-forming agents that may be used in the polymer composition include, but are not limited to, sugars such as sucrose and dextrose, salts such as sodium chloride and sodium carbonate, polymers such as hydroxylpropylcellulose, carboxymethylcellulose, polyethylene glycol, and polyvinylpyrrolidone. Solid crystals that will provide a defined pore size, such as salt or sugar, are preferred.

[0838] In specific preferred embodiments the polypeptide, polynucleotide, and antibody compositions of the invention are formulated using the BEMA™ BioErodible Mucoadhesive System, MCA™ MucoCutaneous Absorption System, SMP™ Solvent MicroParticle System, or BCP™ BioCompatible Polymer System of Atrix Laboratories, Inc. (Fort Collins, Colo.).

[0839] Sustained-release Therapeutics also include liposomally entrapped Therapeutics of the invention (see generally, Langer, Science 249:1527-1533 (1990); Treat et al., in Liposomes in the Therapy of Infectious Disease and Cancer, Lopez-Berestein and Fidler (eds.), Liss, New York, pp. 317-327 and 353-365 (1989)). Liposomes containing the Therapeutic are prepared by methods known per se: DE 3,218,121; Epstein et al., Proc. Natl. Acad. Sci. (USA) 82:3688-3692 (1985); Hwang et al., Proc. Natl. Acad. Sci. (USA) 77:4030-4034 (1980); EP 52,322; EP 36,676; EP 88,046; EP 143,949; EP 142,641; Japanese Pat. Appl. 83-118008; U.S. Pat. Nos. 4,485,045 and 4,544,545; and EP 102,324. Ordinarily, the liposomes are of the small (about 200-800 Angstroms) unilamellar type in which the lipid content is greater than about 30 mol. percent cholesterol, the selected proportion being adjusted for the optimal Therapeutic.

[0840] In yet an additional embodiment, the Therapeutics of the invention are delivered by way of a pump (see Langer, supra; Sefton, CRC Crit. Ref. Biomed. Eng. 14:201 (1987); Buchwald et al., Surgery 88:507 (1980); Saudek et al., N. Engl. J. Med. 321:574 (1989)).

[0841] Other controlled release systems are discussed in the review by Langer (Science 249:1527-1533 (1990)).

[0842] For parenteral administration, in one embodiment, the Therapeutic is formulated generally by mixing it at the desired degree of purity, in a unit dosage injectable form (solution, suspension, or emulsion), with a pharmaceutically acceptable carrier, i.e., one that is non-toxic to recipients at the dosages and concentrations employed and is compatible with other ingredients of the formulation. For example, the formulation preferably does not include oxidizing agents and other compounds that are known to be deleterious to the Therapeutic.

[0843] Generally, the formulations are prepared by contacting the Therapeutic uniformly and intimately with liquid carriers or finely divided solid carriers or both. Then, if necessary, the product is shaped into the desired formulation. Preferably the carrier is a parenteral carrier, more preferably a solution that is isotonic with the blood of the recipient. Examples of such carrier vehicles include water, saline, Ringer's solution, and dextrose solution. Non-aqueous vehicles such as fixed oils and ethyl oleate are also useful herein, as well as liposomes.

[0844] The carrier suitably contains minor amounts of additives such as substances that enhance isotonicity and chemical stability. Such materials are non-toxic to recipients at the dosages and concentrations employed, and include buffers such as phosphate, citrate, succinate, acetic acid, and other organic acids or their salts; antioxidants such as ascorbic acid; low molecular weight (less than about ten residues) polypeptides, e.g., polyarginine or tripeptides; proteins, such as serum albumin, gelatin, or immunoglobulins; hydrophilic polymers such as polyvinylpyrrolidone; amino acids, such as glycine, glutamic acid, aspartic acid, or arginine; monosaccharides, disaccharides, and other carbohydrates including cellulose or its derivatives, glucose, manose, or dextrins; chelating agents such as EDTA; sugar alcohols such as mannitol or sorbitol; counterions such as sodium; and/or nonionic surfactants such as polysorbates, poloxamers, or PEG.

[0845] The Therapeutic is typically formulated in such vehicles at a concentration of about 0.1 mg/ml to 100 mg/ml, preferably 1-10 mg/ml, at a pH of about 3 to 8. It will be understood that the use of certain of the foregoing excipients, carriers, or stabilizers will result in the formation of polypeptide salts.

[0846] Any pharmaceutical used for therapeutic administration can be sterile. Sterility is readily accomplished by filtration through sterile filtration membranes (e.g., 0.2 micron membranes). Therapeutics generally are placed into a container having a sterile access port, for example, an intravenous solution bag or vial having a stopper pierceable by a hypodermic injection needle.

[0847] Therapeutics ordinarily will be stored in unit or multi-dose containers, for example, sealed ampoules or vials, as an aqueous solution or as a lyophilized formulation for reconstitution. As an example of a lyophilized formulation, 10-ml vials are filled with 5 ml of sterile-filtered 1% (w/v) aqueous Therapeutic solution, and the resulting mixture is lyophilized. The infusion solution is prepared by reconstituting the lyophilized Therapeutic using bacteriostatic Water-for-Injection.

[0848] The invention also provides a pharmaceutical pack or kit comprising one or more containers filled with one or more of the ingredients of the Therapeutics of the invention. Associated with such container(s) can be a notice in the form prescribed by a governmental agency regulating the manufacture, use or sale of pharmaceuticals or biological products, which notice reflects approval by the agency of manufacture, use or sale for human administration. In addition, the Therapeutics may be employed in conjunction with other therapeutic compounds.

[0849] The Therapeutics of the invention may be administered alone or in combination with adjuvants. Adjuvants that may be administered with the Therapeutics of the invention include, but are not limited to, alum, alum plus deoxycholate (ImmunoAg), MTP-PE (Biocine Corp.), QS21 (Genentech, Inc.), BCG (e.g., THERACYS®), MPL and nonviable prepartions of Corynebacterium parvum. In a specific embodiment, Therapeutics of the invention are administered in combination with alum. In another specific embodiment, Therapeutics of the invention are administered in combination with QS-21. Further adjuvants that may be administered with the Therapeutics of the invention include, but are not limited to, Monophosphoryl lipid immunomodulator, AdjuVax 100a, QS-21, QS-18, CRL1005, Aluminum salts, MF-59, and Virosomal adjuvant technology. Vaccines that may be administered with the Therapeutics of the invention include, but are not limited to, vaccines directed toward protection against MMR (measles, mumps, rubella), polio, varicella, tetanus/diptheria, hepatitis A, hepatitis B, haemophilus influenzae B, whooping cough, pneumonia, influenza, Lyme's Disease, rotavirus, cholera, yellow fever, Japanese encephalitis, poliomyelitis, rabies, typhoid fever, and pertussis. Combinations may be administered either concomitantly, e.g., as an admixture, separately but simultaneously or concurrently; or sequentially. This includes presentations in which the combined agents are administered together as a therapeutic mixture, and also procedures in which the combined agents are administered separately but simultaneously, e.g., as through separate intravenous lines into the same individual. Administration “in combination” further includes the separate administration of one of the compounds or agents given first, followed by the second.

[0850] The Therapeutics of the invention may be administered alone or in combination with other therapeutic agents. Therapeutic agents that may be administered in combination with the Therapeutics of the invention, include but not limited to, chemotherapeutic agents, antibiotics, steroidal and non-steroidal anti-inflammatories, conventional immunotherapeutic agents, and/or therapeutic treatments described below. Combinations may be administered either concomitantly, e.g., as an admixture, separately but simultaneously or concurrently; or sequentially. This includes presentations in which the combined agents are administered together as a therapeutic mixture, and also procedures in which the combined agents are administered separately but simultaneously, e.g., as through separate intravenous lines into the same individual. Administration “in combination” further includes the separate administration of one of the compounds or agents given first, followed by the second.

[0851] In one embodiment, the Therapeutics of the invention are administered in combination with an anticoagulant. Anticoagulants that may be administered with the compositions of the invention include, but are not limited to, heparin, low molecular weight heparin, warfarin sodium (e.g., COUMADIN®), dicumarol, 4-hydroxycoumarin, anisindione (e.g., MIRADON™), acenocoumarol (e.g., nicoumalone, SINTHROME™), indan-1,3-dione, phenprocoumon (e.g., MARCUMAR™), ethyl biscoumacetate (e.g., TROMEXAN™), and aspirin. In a specific embodiment, compositions of the invention are administered in combination with heparin and/or warfarin. In another specific embodiment, compositions of the invention are administered in combination with warfarin. In another specific embodiment, compositions of the invention are administered in combination with warfarin and aspirin. In another specific embodiment, compositions of the invention are administered in combination with heparin. In another specific embodiment, compositions of the invention are administered in combination with heparin and aspirin.

[0852] In another embodiment, the Therapeutics of the invention are administered in combination with thrombolytic drugs. Thrombolytic drugs that may be administered with the compositions of the invention include, but are not limited to, plasminogen, lys-plasminogen, alpha2-antiplasmin, streptokinae (e.g., KABIKINASE™), antiresplace (e.g., EMINASE™), tissue plasminogen activator (t-PA, altevase, ACTIVASE™), urokinase (e.g., ABBOKINASE™), sauruplase, (Prourokinase, single chain urokinase), and aminocaproic acid (e.g., AMICAR™). In a specific embodiment, compositions of the invention are administered in combination with tissue plasminogen activator and aspirin.

[0853] In another embodiment, the Therapeutics of the invention are administered in combination with antiplatelet drugs. Antiplatelet drugs that may be administered with the compositions of the invention include, but are not limited to, aspirin, dipyridamole (e.g., PERSANTINE™), and ticlopidine (e.g., TICLID™).

[0854] In specific embodiments, the use of anti-coagulants, thrombolytic and/or antiplatelet drugs in combination with Therapeutics of the invention is contemplated for the detection, prevention, diagnosis, prognostication, treatment, and/or amelioration of thrombosis, arterial thrombosis, venous thrombosis, thromboembolism, pulmonary embolism, atherosclerosis, myocardial infarction, transient ischemic attack, unstable angina. In specific embodiments, the use of anticoagulants, thrombolytic drugs and/or antiplatelet drugs in combination with Therapeutics of the invention is contemplated for the prevention of occulsion of saphenous grafts, for reducing the risk of periprocedural thrombosis as might accompany angioplasty procedures, for reducing the risk of stroke in patients with atrial fibrillation including nonrheumatic atrial fibrillation, for reducing the risk of embolism associated with mechanical heart valves and or mitral valves disease. Other uses for the therapeutics of the invention, alone or in combination with antiplatelet, anticoagulant, and/or thrombolytic drugs, include, but are not limited to, the prevention of occlusions in extracorporeal devices (e.g., intravascular canulas, vascular access shunts in hemodialysis patients, hemodialysis machines, and cardiopulmonary bypass machines).

[0855] In certain embodiments, Therapeutics of the invention are administered in combination with antiretroviral agents, nucleoside/nucleotide reverse transcriptase inhibitors (NRTIs), non-nucleoside reverse transcriptase inhibitors (NNRTIs), and/or protease inhibitors (PIs). NRTIs that may be administered in combination with the Therapeutics of the invention, include, but are not limited to, RETROVIR™ (zidovudine/AZT), VIDEX™ (didanosine/ddI), HIVID™ (zalcitabine/ddC), ZERIT™ (stavudine/d4T), EPIVIR™ (lamivudine/3TC), and COMBIVIR™ (zidovudine/lamivudine). NNRTIs that may be administered in combination with the Therapeutics of the invention, include, but are not limited to, VIRAMUNE™ (nevirapine), RESCRIPTOR™ (delavirdine), and SUSTIVA™ (efavirenz). Protease inhibitors that may be administered in combination with the Therapeutics of the invention, include, but are not limited to, CRIXIVAN™ (indinavir), NORVIR™ (ritonavir), INVIRASE™ (saquinavir), and VIRACEPT™ (nelfinavir). In a specific embodiment, antiretroviral agents, nucleoside reverse transcriptase inhibitors, non-nucleoside reverse transcriptase inhibitors, and/or protease inhibitors may be used in any combination with Therapeutics of the invention to treat AIDS and/or to prevent or treat HIV infection.

[0856] Additional NRTIs include LODENOSINE™ (F-ddA; an acid-stable adenosine NRTI; Triangle/Abbott; COVIRACL™ (emtricitabine/FTC; structurally related to lamivudine (3TC) but with 3- to 10-fold greater activity in vitro; Triangle/Abbott); dOTC (BCH-10652, also structurally related to lamivudine but retains activity against a substantial proportion of lamivudine-resistant isolates; Biochem Pharma); Adefovir (refused approval for anti-HIV therapy by FDA; Gilead Sciences); PREVEON® (Adefovir Dipivoxil, the active prodrug of adefovir; its active form is PMEA-pp); TENOFOVIR™ (bis-POC PMPA, a PMPA prodrug; Gilead); DAPD/DXG (active metabolite of DAPD; Triangle/Abbott); D-D4FC (related to 3TC, with activity against AZT/3TC-resistant virus); GW420867X (Glaxo Wellcome); ZIAGEN™ (abacavir/159U89; Glaxo Wellcome Inc.); CS-87 (3′azido-2′,3′-dideoxyuridine; WO 99/66936); and S-acyl-2-thioethyl (SATE)-bearing prodrug forms of β-L-FD4C and β-L-FddC (WO 98/17281).

[0857] Additional NNRTIs include COACTINON™ (Emivirine/MKC-442, potent NNRTI of the HEPT class; Triangle/Abbott); CAPRAVIRINE™ (AG-1549/S-1153, a next generation NNRTI with activity against viruses containing the K103N mutation; Agouron); PNU-142721 (has 20- to 50-fold greater activity than its predecessor delavirdine and is active against K103N mutants; Pharmacia & Upjohn); DPC-961 and DPC-963 (second-generation derivatives of efavirenz, designed to be active against viruses with the K103N mutation; DuPont); GW-420867X (has 25-fold greater activity than HBY097 and is active against K103N mutants; Glaxo Wellcome); CALANOLIDE A (naturally occurring agent from the latex tree; active against viruses containing either or both the Y181C and K103N mutations); and Propolis (WO 99/49830).

[0858] Additional protease inhibitors include LOPINAVIR™ (ABT378/r; Abbott Laboratories); BMS-232632 (an azapeptide; Bristol-Myres Squibb); TIPRANAVIR™ (PNU-140690, a non-peptic dihydropyrone; Pharmacia & Upjohn); PD-178390 (a nonpeptidic dihydropyrone; Parke-Davis); BMS 232632 (an azapeptide; Bristol-Myers Squibb); IL-756,423 (an indinavir analog; Merck); DMP-450 (a cyclic urea compound; Avid & DuPont); AG-1776 (a peptidomimetic with in vitro activity against protease inhibitor-resistant viruses; Agouron); VX-175/GW-433908 (phosphate prodrug of amprenavir; Vertex & Glaxo Welcome); CGP61755 (Ciba); and AGENERASE™ (amprenavir; Glaxo Wellcome Inc.).

[0859] Additional antiretroviral agents include fusion inhibitors/gp41 binders. Fusion inhibitors/gp41 binders include T-20 (a peptide from residues 643-678 of the HIV gp41 transmembrane protein ectodomain which binds to gp41 in its resting state and prevents transformation to the fusogenic state; Trimeris) and T-1249 (a second-generation fusion inhibitor; Trimeris).

[0860] Additional antiretroviral agents include fusion inhibitors/chemokine receptor antagonists. Fusion inhibitors/chemokine receptor antagonists include CXCR4 antagonists such as AMD 3100 (a bicyclam), SDF-1 and its analogs, and ALX40-4C (a cationic peptide), T22 (an 18 amino acid peptide; Trimeris) and the T22 analogs T134 and T140; CCR5 antagonists such as RANTES (9-68), AOP-RANTES, NNY-RANTES, and TAK-779; and CCR5/CXCR4 antagonists such as NSC 651016 (a distamycin analog). Also included are CCR2B, CCR3, and CCR6 antagonists. Chemokine recpetor agonists such as RANTES, SDF-1, MIP-1α, MIP-1β, etc., may also inhibit fusion.

[0861] Additional antiretroviral agents include integrase inhibitors. Integrase inhibitors include dicaffeoylquinic (DFQA) acids; L-chicoric acid (a dicaffeoyltartaric (DCTA) acid); quinalizarin (QLC) and related anthraquinones; ZINTEVIR™ (AR 177, an oligonucleotide that probably acts at cell surface rather than being a true integrase inhibitor; Arondex); and naphthols such as those disclosed in WO 98/50347.

[0862] Additional antiretroviral agents include hydroxyurea-like compunds such as BCX-34 (a purine nucleoside phosphorylase inhibitor; Biocryst); ribonucleotide reductase inhibitors such as DIDOX™ (Molecules for Health); inosine monophosphate dehydrogenase (IMPDH) inhibitors sucha as VX-497 (Vertex); and mycopholic acids such as CellCept (mycophenolate mofetil; Roche).

[0863] Additional antiretroviral agents include inhibitors of viral integrase, inhibitors of viral genome nuclear translocation such as arylene bis(methylketone) compounds; inhibitors of HIV entry such as AOP-RANTES, NNY-RANTES, RANTES-lgG fusion protein, soluble complexes of RANTES and glycosaminoglycans (GAG), and AMD-3100; nucleocapsid zinc finger inhibitors such as dithiane compounds; targets of HIV Tat and Rev; and pharmacoenhancers such as ABT-378.

[0864] Other antiretroviral therapies and adjunct therapies include cytokines and lymphokines such as MIP-1α, MIP-1β, SDF-1α, IL-2, PROLEUKIN™ (aldesleukin/L2-7001; Chiron), IL-4, IL-10, IL-12, and IL-13; interferons such as IFN-α2a; antagonists of TNFs, NFκB, GM-CSF, M-CSF, and IL-10; agents that modulate immune activation such as cyclosporin and prednisone; vaccines such as Remune™ (HIV Immunogen), APL 400-003 (Apollon), recombinant gp120 and fragments, bivalent (B/E) recombinant envelope glycoprotein, rgp120CM235, MN rgp120, SF-2 rgp120, gp120/soluble CD4 complex, Delta JR-FL protein, branched synthetic peptide derived from discontinuous gp120 C3/C4 domain, fusion-competent immunogens, and Gag, Pol, Nef, and Tat vaccines; gene-based therapies such as genetic suppressor elements (GSEs; WO 98/54366), and intrakines (genetically modified CC chemokines targetted to the ER to block surface expression of newly synthesized CCR5 (Yang et al., PNAS 94:11567-72 (1997); Chen et al., Nat. Med. 3:1110-16 (1997)); antibodies such as the anti-CXCR4 antibody 12G5, the anti-CCR5 antibodies 2D7, 5C7, PA8, PA9, PA10, PA11, PA12, and PA14, the anti-CD4 antibodies Q4120 and RPA-T4, the anti-CCR3 antibody 7B11, the anti-gp120 antibodies 17b, 48d, 447-52D, 257-D, 268-D and 50.1, anti-Tat antibodies, anti-TNF-α antibodies, and monoclonal antibody 33A; aryl hydrocarbon (AH) receptor agonists and antagonists such as TCDD, 3,3′,4,4′,5-pentachlorobiphenyl, 3,3′,4,4′-tetrachlorobiphenyl, and α-naphthoflavone (WO 98/30213); and antioxidants such as γ-L-glutamyl-L-cysteine ethyl ester (γ-GCE; WO 99/56764).

[0865] In a further embodiment, the Therapeutics of the invention are administered in combination with an antiviral agent. Antiviral agents that may be administered with the Therapeutics of the invention include, but are not limited to, acyclovir, ribavirin, amantadine, and remantidine.

[0866] In other embodiments, Therapeutics of the invention may be administered in combination with anti-opportunistic infection agents. Anti-opportunistic agents that may be administered in combination with the Therapeutics of the invention, include, but are not limited to, TRIMETHOPRIM-SULFAMETHOXAZOLE™, DAPSONE™, PENTAMIDINE™, ATOVAQUONE™, ISONIAZID™, RIFAMPIN™, PYRAZINAMIDE™, ETHAMBUTOL™, RIFABUTIN™, CLARITHROMYCIN™, AZITHROMYCIN™, GANCICLOVIR™, FOSCARNET™, CIDOFOVIR™, FLUCONAZOLE™, ITRACONAZOLE™, KETOCONAZOLE™, ACYCLOVIR™, FAMCICOLVIR™, PYRIMETRAMINE™, LEUCOVORIN™, NEUPOGEN™ (filgrastim/G-CSF), and LEUKINE™ (sargramostim/GM-CSF). In a specific embodiment, Therapeutics of the invention are used in any combination with TRIMETHOPRIM-SULFAMETHOXAZOLE™, DAPSONE™, PENTAMIDINE™, and/or ATOVAQUONE™ to prophylactically treat or prevent an opportunistic Pneumocystis carinii pneumonia infection. In another specific embodiment, Therapeutics of the invention are used in any combination with ISONIAZID™, RIFAMPIN™, PYRAZINAMIDE™, and/or ETHAMBUTOL™ to prophylactically treat or prevent an opportunistic Mycobacterium avium complex infection. In another specific embodiment, Therapeutics of the invention are used in any combination with RIFABUTIN™, CLARITHROMYCIN™, and/or AZITHROMYCIN™ to prophylactically treat or prevent an opportunistic Mycobacterium tuberculosis infection. In another specific embodiment, Therapeutics of the invention are used in any combination with GANCICLOVIR™, FOSCARNET™, and/or CIDOFOVIR™ to prophylactically treat or prevent an opportunistic cytomegalovirus infection. In another specific embodiment, Therapeutics of the invention are used in any combination with FLUCONAZOLE™, ITRACONAZOLE™, and/or KETOCONAZOLE™ to prophylactically treat or prevent an opportunistic fungal infection. In another specific embodiment, Therapeutics of the invention are used in any combination with ACYCLOVIR™ and/or FAMCICOLVIR™ to prophylactically treat or prevent an opportunistic herpes simplex virus type I and/or type II infection. In another specific embodiment, Therapeutics of the invention are used in any combination with PYRIMETHAMINE™ and/or LEUCOVORIN™ to prophylactically treat or prevent an opportunistic Toxoplasma gondii infection. In another specific embodiment, Therapeutics of the invention are used in any combination with LEUCOVORIN™ and/or NEUPOGEN™ to prophylactically treat or prevent an opportunistic bacterial infection.

[0867] In a further embodiment, the Therapeutics of the invention are administered in combination with an antibiotic agent. Antibiotic agents that may be administered with the Therapeutics of the invention include, but are not limited to, amoxicillin, beta-lactamases, aminoglycosides, beta-lactam (glycopeptide), beta-lactamases, Clindamycin, chloramphenicol, cephalosporins, ciprofloxacin, erythromycin, fluoroquinolones, macrolides, metronidazole, penicillins, quinolones, rapamycin, rifampin, streptomycin, sulfonamide, tetracyclines, trimethoprim, trimethoprim-sulfamethoxazole, and vancomycin.

[0868] In other embodiments, the Therapeutics of the invention are administered in combination with immunestimulants. Immunostimulants that may be administered in combination with the Therapeutics of the invention include, but are not limited to, levamisole (e.g., ERGAMISOL™), isoprinosine (e.g. INOSIPLEX™), interferons (e.g. interferon alpha), and interleukins (e.g., IL-2).

[0869] In other embodiments, Therapeutics of the invention are administered in combination with immunosuppressive agents. Immunosuppressive agents that may be administered in combination with the Therapeutics of the invention include, but are not limited to, steroids, cyclosporine, cyclosporine analogs, cyclophosphamide methylprednisone, prednisone, azathioprine, FK-506, 15-deoxyspergualin, and other immunosuppressive agents that act by suppressing the function of responding T cells. Other immunosuppressive agents that may be administered in combination with the Therapeutics of the invention include, but are not limited to, prednisolone, methotrexate, thalidomide, methoxsalen, rapamycin, leflunomide, mizoribine (BREDININ™), brequinar, deoxyspergualin, and azaspirane (SKF 105685), ORTHOCLONE OKT® 3 (muromonab-CD3), SANDIMMUNE™, NEORAL™, SANGDYA™ (cyclosporine), PROGRAF® (FK506, tacrolimus), CELLCEPT® (mycophenolate motefil, of which the active metabolite is mycophenolic acid), IMURAN™ (azathioprine), glucocorticosteroids, adrenocortical steroids such as DELTASONE™ (prednisone) and HYDELTRASOL™ (prednisolone), FOLEX™ and MEXATE™ (methotrxate), OXSORALEN-ULTRA™ (methoxsalen) and RAPAMUNE™ (sirolimus). In a specific embodiment, immunosuppressants may be used to prevent rejection of organ or bone marrow transplantation.

[0870] In an additional embodiment, Therapeutics of the invention are administered alone or in combination with one or more intravenous immune globulin preparations. Intravenous immune globulin preparations that may be administered with the Therapeutics of the invention include, but not limited to, GAMMAR™, IVEEGAM™, SANDOGLOBULIN™, GAMMAGARD S/D™, ATGAM™ (antithymocyte glubulin), and GAMIMUNE™. In a specific embodiment, Therapeutics of the invention are administered in combination with intravenous immune globulin preparations in transplantation therapy (e.g., bone marrow transplant).

[0871] In certain embodiments, the Therapeutics of the invention are administered alone or in combination with an anti-inflammatory agent. Anti-inflammatory agents that may be administered with the Therapeutics of the invention include, but are not limited to, corticosteroids (e.g. betamethasone, budesonide, cortisone, dexamethasone, hydrocortisone, methylprednisolone, prednisolone, prednisone, and triamcinolone), nonsteroidal anti-inflammatory drugs (e.g., diclofenac, diflunisal, etodolac, fenoprofen, floctafenine, flurbiprofen, ibuprofen, indomethacin, ketoprofen, meclofenamate, mefenamic acid, meloxicam, nabumetone, naproxen, oxaprozin, phenylbutazone, piroxicam, sulindac, tenoxicam, tiaprofenic acid, and tolmetin), as well as antihistamines, aminoarylcarboxylic acid derivatives, arylacetic acid derivatives, arylbutyric acid derivatives, arylcarboxylic acids, arylpropionic acid derivatives, pyrazoles, pyrazolones, salicylic acid derivatives, thiazinecarboxamides, e-acetamidocaproic acid, S-adenosylmethionine, 3-amino-4-hydroxybutyric acid, amixetrine, bendazac, benzydamine, bucolome, difenpiramide, ditazol, emorfazone, guaiazulene, nabumetone, nimesulide, orgotein, oxaceprol, paranyline, perisoxal, pifoxime, proquazone, proxazole, and tenidap.

[0872] In an additional embodiment, the compositions of the invention are administered alone or in combination with an anti-angiogenic agent. Anti-angiogenic agents that may be administered with the compositions of the invention include, but are not limited to, Angiostatin (Entremed, Rockville, Md.), Troponin-1 (Boston Life Sciences, Boston, Mass.), anti-Invasive Factor, retinoic acid and derivatives thereof, paclitaxel (Taxol), Suramin, Tissue Inhibitor of Metalloproteinase-1, Tissue Inhibitor of Metalloproteinase-2, VEGI, Plasminogen Activator Inhibitor-1, Plasminogen Activator Inhibitor-2, and various forms of the lighter “d group” transition metals.

[0873] Lighter “d group” transition metals include, for example, vanadium, molybdenum, tungsten, titanium, niobium, and tantalum species. Such transition metal species may form transition metal complexes. Suitable complexes of the above-mentioned transition metal species include oxo transition metal complexes.

[0874] Representative examples of vanadium complexes include oxo vanadium complexes such as vanadate and vanadyl complexes. Suitable vanadate complexes include metavanadate and orthovanadate complexes such as, for example, ammonium metavanadate, sodium metavanadate, and sodium orthovanadate. Suitable vanadyl complexes include, for example, vanadyl acetylacetonate and vanadyl sulfate including vanadyl sulfate hydrates such as vanadyl sulfate mono- and trihydrates.

[0875] Representative examples of tungsten and molybdenum complexes also include oxo complexes. Suitable oxo tungsten complexes include tungstate and tungsten oxide complexes. Suitable tungstate complexes include ammonium tungstate, calcium tungstate, sodium tungstate dihydrate, and tungstic acid. Suitable tungsten oxides include tungsten (IV) oxide and tungsten (VI) oxide. Suitable oxo molybdenum complexes include molybdate, molybdenum oxide, and molybdenyl complexes. Suitable molybdate complexes include ammonium molybdate and its hydrates, sodium molybdate and its hydrates, and potassium molybdate and its hydrates. Suitable molybdenum oxides include molybdenum (VI) oxide, molybdenum (VI) oxide, and molybdic acid. Suitable molybdenyl complexes include, for example, molybdenyl acetylacetonate. Other suitable tungsten and molybdenum complexes include hydroxo derivatives derived from, for example, glycerol, tartaric acid, and sugars.

[0876] A wide variety of other anti-angiogenic factors may also be utilized within the context of the present invention. Representative examples include, but are not limited to, platelet factor 4; protamine sulphate; sulphated chitin derivatives (prepared from queen crab shells), (Murata et al., Cancer Res. 51:22-26, (1991)); Sulphated Polysaccharide Peptidoglycan Complex (SP-PG) (the function of this compound may be enhanced by the presence of steroids such as estrogen, and tamoxifen citrate); Staurosporine; modulators of matrix metabolism, including for example, proline analogs, cishydroxyproline, d,L-3,4-dehydroproline, Thiaproline, alpha,alpha-dipyridyl, aminopropionitrile fumarate; 4-propyl-5-(4-pyridinyl)-2(3H)-oxazolone; Methotrexate; Mitoxantrone; Heparin; Interferons; 2 Macroglobulin-serum; ChIMP-3 (Pavloff et al., J. Bio. Chem. 267:17321-17326, (1992)); Chymostatin (Tomkinson et al., Biochem J. 286:475-480, (1992)); Cyclodextrin Tetradecasulfate; Eponemycin; Camptothecin; Fumagillin (Ingber et al., Nature 348:555-557, (1990)); Gold Sodium Thiomalate (“GST”; Matsubara and Ziff, J. Clin. Invest. 79:1440-1446, (1987)); anticollagenase-serum; alpha2-antiplasmin (Holmes et al., J. Biol. Chem. 262(4):1659-1664, (1987)); Bisantrene (National Cancer Institute); Lobenzarit disodium (N-(2)-carboxyphenyl-4-chloroanthronilic acid disodium or “CCA”; (Takeuchi et al., Agents Actions 36:312-316, (1992)); and metalloproteinase inhibitors such as BB94.

[0877] Additional anti-angiogenic factors that may also be utilized within the context of the present invention include Thalidomide, (Celgene, Warren, N.J.); Angiostatic steroid; AGM-1470 (H. Brem and J. Folkman J Pediatr. Surg. 28:445-51 (1993)); an integrin alpha v beta 3 antagonist (C. Storgard et al., J Clin. Invest. 103:47-54 (1999)); carboxynaminolmidazole; Carboxyamidotriazole (CAI) (National Cancer Institute, Bethesda, Md.); Conbretastatin A-4 (CA4P) (OXiGENE, Boston, Mass.); Squalamine (Magainin Pharmaceuticals, Plymouth Meeting, Pa.); TNP-470, (Tap Pharmaceuticals, Deerfield, Ill.); ZD-0101 AstraZeneca (London, UK); APRA (CT2584); Benefin, Byrostatin-1 (SC339555); CGP-41251 (PKC 412); CM101; Dexrazoxane (ICRF187); DMXAA; Endostatin; Flavopridiol; Genestein; GTE; ImmTher; Iressa (ZD1839); Octreotide (Somatostatin); Panretin; Penacillamine; Photopoint; PI-88; Prinomastat (AG-3340) Purlytin; Suradista (FCE26644); Tamoxifen (Nolvadex); Tazarotene; Tetrathiomolybdate; Xeloda (Capecitabine); and 5-Fluorouracil.

[0878] Anti-angiogenic agents that may be administed in combination with the compounds of the invention may work through a variety of mechanisms including, but not limited to, inhibiting proteolysis of the extracellular matrix, blocking the function of endothelial cell-extracellular matrix adhesion molecules, by antagonizing the function of angiogenesis inducers such as growth factors, and inhibiting integrin receptors expressed on proliferating endothelial cells. Examples of anti-angiogenic inhibitors that interfere with extracellular matrix proteolysis and which may be administered in combination with the compositons of the invention include, but are not lmited to, AG-3340 (Agouron, La Jolla, Calif.), BAY-12-9566 (Bayer, West Haven, Conn.), BMS-275291 (Bristol Myers Squibb, Princeton, N.J.), CGS-27032A (Novartis, East Hanover, N.J.), Marimastat (British Biotech, Oxford, UK), and Metastat (Aeterna, St-Foy, Quebec). Examples of anti-angiogenic inhibitors that act by blocking the function of endothelial cell-extracellular matrix adhesion molecules and which may be administered in combination with the compositons of the invention include, but are not Imited to, EMD-121974 (Merck KcgaA Darmstadt, Germany) and Vitaxin (Ixsys, La Jolla, Calif./Medimmune, Gaithersburg, Md.). Examples of anti-angiogenic agents that act by directly antagonizing or inhibiting angiogenesis inducers and which may be administered in combination with the compositons of the invention include, but are not Imited to, Angiozyme (Ribozyme, Boulder, Colo.), Anti-VEGF antibody (Genentech, S. San Francisco, Calif.), PTK-787/ZK-225846 (Novartis, Basel, Switzerland), SU-101 (Sugen, S. San Francisco, Calif.), SU-5416 (Sugen/Pharmacia Upjohn, Bridgewater, N.J.), and SU-6668 (Sugen). Other anti-angiogenic agents act to indirectly inhibit angiogenesis. Examples of indirect inhibitors of angiogenesis which may be administered in combination with the compositons of the invention include, but are not limited to, IM-862 (Cytran, Kirkland, Wash.), Interferon-alpha, IL-12 (Roche, Nutley, N.J.), and Pentosan polysulfate (Georgetown University, Washington, D.C.).

[0879] In particular embodiments, the use of compositions of the invention in combination with anti-angiogenic agents is contemplated for the treatment, prevention, and/or amelioration of an autoimmune disease, such as for example, an autoimmune disease described herein.

[0880] In a particular embodiment, the use of compositions of the invention in combination with anti-angiogenic agents is contemplated for the treatment, prevention, and/or amelioration of arthritis. In a more particular embodiment, the use of compositions of the invention in combination with anti-angiogenic agents is contemplated for the treatment, prevention, and/or amelioration of rheumatoid arthritis.

[0881] In another embodiment, the polynucleotides encoding a polypeptide of the present invention are administered in combination with an angiogenic protein, or polynucleotides encoding an angiogenic protein. Examples of angiogenic proteins that may be administered with the compositions of the invention include, but are not limited to, acidic and basic fibroblast growth factors, VEGF-1, VEGF-2, VEGF-3, epidermal growth factor alpha and beta, platelet-derived endothelial cell growth factor, platelet-derived growth factor, tumor necrosis factor alpha, hepatocyte growth factor, insulin-like growth factor, colony stimulating factor, macrophage colony stimulating factor, granulocyte/macrophage colony stimulating factor, and nitric oxide synthase.

[0882] In additional embodiments, compositions of the invention are administered in combination with a chemotherapeutic agent. Chemotherapeutic agents that may be administered with the Therapeutics of the invention include, but are not limited to alkylating agents such as nitrogen mustards (for example, Mechlorethamine, cyclophosphamide, Cyclophosphamide Ifosfamide, Melphalan (L-sarcolysin), and Chlorambucil), ethylenimines and methylmelamines (for example, Hexamethylmelamine and Thiotepa), alkyl sulfonates (for example, Busulfan), nitrosoureas (for example, Cammustine (BCNU), Lomustine (CCNU), Semustine (methyl-CCNU), and Streptozocin (streptozotocin)), triazenes (for example, Dacarbazine (DTIC; dimethyltriazenoimidazolecarboxamide)), folic acid analogs (for example, Methotrexate (amethopterin)), pyrimidine analogs (for example, Fluorouacil (5-fluorouracil; 5-FU), Floxuridine (fluorodeoxyuridine; FudR), and Cytarabine (cytosine arabinoside)), purine analogs and related inhibitors (for example, Mercaptopurine (6-mercaptopurine; 6-MP), Thioguanine (6-thioguanine; TG), and Pentostatin (2′-deoxycoformycin)), vinca alkaloids (for example, Vinblastine (VLB, vinblastine sulfate)) and Vincristine (vincristine sulfate)), epipodophyllotoxins (for example, Etoposide and Teniposide), antibiotics (for example, Dactinomycin (actinomycin D), Daunorubicin (daunomycin; rubidomycin), Doxorubicin, Bleomycin, Plicamycin (mithramycin), and Mitomycin (mitomycin C), enzymes (for example, L-Asparaginase), biological response modifiers (for example, Interferon-alpha and interferon-alpha-2b), platinum coordination compounds (for example, Cisplatin (cis-DDP) and Carboplatin), anthracenedione (Mitoxantrone), substituted ureas (for example, Hydroxyurea), methylhydrazine derivatives (for example, Procarbazine (N-methylhydrazine; MIH), adrenocorticosteroids (for example, Prednisone), progestins (for example, Hydroxyprogesterone caproate, Medroxyprogesterone, Medroxyprogesterone acetate, and Megestrol acetate), estrogens (for example, Diethylstilbestrol (DES), Diethylstilbestrol diphosphate, Estradiol, and Ethinyl estradiol), antiestrogens (for example, Tamoxifen), androgens (Testosterone proprionate, and Fluoxymesterone), antiandrogens (for example, Flutamide), gonadotropin-releasing horomone analogs (for example, Leuprolide), other hormones and hormone analogs (for example, methyltestosterone, estramustine, estramustine phosphate sodium, chlorotrianisene, and testolactone), and others (for example, dicarbazine, glutamic acid, and mitotane).

[0883] In one embodiment, the compositions of the invention are administered in combination with one or more of the following drugs: infliximab (also known as Remicade™ Centocor, Inc.), Trocade (Roche, RO-32-3555), Leflunomide (also known as Arava™ from Hoechst Marion Roussel), Kineret™ (an IL-1 Receptor antagonist also known as Anakinra from Amgen, Inc.)

[0884] In a specific embodiment, compositions of the invention are administered in combination with CHOP (cyclophosphamide, doxorubicin, vincristine, and prednisone) or combination of one or more of the components of CHOP. In one embodiment, the compositions of the invention are administered in combination with anti-CD20 antibodies, human monoclonal anti-CD20 antibodies. In another embodiment, the compositions of the invention are administered in combination with anti-CD20 antibodies and CHOP, or anti-CD20 antibodies and any combination of one or more of the components of CHOP, particularly cyclophosphamide and/or prednisone. In a specific embodiment, compositions of the invention are administered in combination with Rituximab. In a further embodiment, compositions of the invention are administered with Rituximab and CHOP, or Rituximab and any combination of one or more of the components of CHOP, particularly cyclophosphamide and/or prednisone. In a specific embodiment, compositions of the invention are administered in combination with tositumomab. In a further embodiment, compositions of the invention are administered with tositumomab and CHOP, or tositumomab and any combination of one or more of the components of CHOP, particularly cyclophosphamide and/or prednisone. The anti-CD20 antibodies may optionally be associated with radioisotopes, toxins or cytotoxic prodrugs.

[0885] In another specific embodiment, the compositions of the invention are administered in combination Zevalin™. In a further embodiment, compositions of the invention are administered with Zevalin™ and CHOP, or Zevalin™ and any combination of one or more of the components of CHOP, particularly cyclophosphamide and/or prednisone. Zevalin™ may be associated with one or more radisotopes. Particularly preferred isotopes are ⁹⁰Y and ¹¹¹In.

[0886] In an additional embodiment, the Therapeutics of the invention are administered in combination with cytokines. Cytokines that may be administered with the Therapeutics of the invention include, but are not limited to, IL2, IL3, IL4, IL5, IL6, IL7, IL10, IL12, IL13, IL15, anti-CD40, CD40L, IFN-gamma and TNF-alpha. In another embodiment, Therapeutics of the invention may be administered with any interleukin, including, but not limited to, IL-1alpha, IL-1beta, IL-2, IL-3, IL-4, IL-5, IL-6, IL-7, IL-8, IL-9, IL-10, IL-1, IL-12, IL-13, IL-14, IL-15, IL-16, IL-17, IL-18, IL-19, IL-20, and IL-21.

[0887] In one embodiment, the Therapeutics of the invention are administered in combination with members of the TNF family. TNF, TNF-related or TNF-like molecules that may be administered with the Therapeutics of the invention include, but are not limited to, soluble forms of TNF-alpha, lymphotoxin-alpha (LT-alpha, also known as TNF-beta), LT-beta (found in complex beterotrimer LT-alpha2-beta), OPGL, FasL, CD27L, CD30L, CD40L, 4-IBBL, DcR3, OX40L, TNF-gamma (International Publication No. WO 96/14328), AIM-I (International Publication No. WO 97/33899), endokine-alpha (International Publication No. WO 98/07880), OPG, and neutrokine-alpha (International Publication No. WO 98/18921, OX40, and nerve growth factor (NGF), and soluble forms of Fas, CD30, CD27, CD40 and 4-IBB, TR2 (International Publication No. WO 96/34095), DR3 (International Publication No. WO 97/33904), DR4 (International Publication No. WO 98/32856), TR5 (International Publication No. WO 98/30693), TRANK, TR9 (International Publication No. WO 98/56892), TR10 (International Publication No. WO 98/54202), 312C2 (International Publication No. WO 98/06842), and TR12, and soluble forms CD154, CD70, and CD153.

[0888] In an additional embodiment, the Therapeutics of the invention are administered in combination with angiogenic proteins. Angiogenic proteins that may be administered with the Therapeutics of the invention include, but are not limited to, Glioma Derived Growth Factor (GDGF), as disclosed in European Patent Number EP-399816; Platelet Derived Growth Factor-A (PDGF-A), as disclosed in European Patent Number EP-682110; Platelet Derived Growth Factor-B (PDGF-B), as disclosed in European Patent Number EP-282317; Placental Growth Factor (PIGF), as disclosed in International Publication Number WO 92/06194; Placental Growth Factor-2 (PIGF-2), as disclosed in Hauser et al., Growth Factors, 4:259-268 (1993); Vascular Endothelial Growth Factor (VEGF), as disclosed in International Publication Number WO 90/13649; Vascular Endothelial Growth Factor-A (VEGF-A), as disclosed in European Patent Number EP-506477; Vascular Endothelial Growth Factor-2 (VEGF-2), as disclosed in International Publication Number WO 96/39515; Vascular Endothelial Growth Factor B (VEGF-3); Vascular Endothelial Growth Factor B-186 (VEGF-B186), as disclosed in International Publication Number WO 96/26736; Vascular Endothelial Growth Factor-D (VEGF-D), as disclosed in International Publication Number WO 98/02543; Vascular Endothelial Growth Factor-D (VEGF-D), as disclosed in International Publication Number WO 98/07832; and Vascular Endothelial Growth Factor-E (VEGF-E), as disclosed in German Patent Number DE19639601. The above mentioned references are herein incorporated by reference in their entireties.

[0889] In an additional embodiment, the Therapeutics of the invention are administered in combination with Fibroblast Growth Factors. Fibroblast Growth Factors that may be administered with the Therapeutics of the invention include, but are not limited to, FGF-1, FGF-2, FGF-3, FGF-4, FGF-5, FGF-6, FGF-7, FGF-8, FGF-9, FGF-10, FGF-11, FGF-12, FGF-13, FGF-14, and FGF-15.

[0890] In an additional embodiment, the Therapeutics of the invention are administered in combination with hematopoietic growth factors. Hematopoietic growth factors that may be administered with the Therapeutics of the invention include, but are not limited to, granulocyte macrophage colony stimulating factor (GM-CSF) (sargramostim, LEUKINE™, PROKINE™), granulocyte colony stimulating factor (G-CSF) (filgrastim, NEUPOGEN™), macrophage colony stimulating factor (M-CSF, CSF-1) erythropoietin (epoetin alfa, EPOGEN™, PROCRI™), stem cell factor (SCF, c-kit ligand, steel factor), megakaryocyte colony stimulating factor, PIXY321 (a GMCSF/IL-3 fusion protein), interleukins, especially any one or more of IL-1 through IL-12, interferon-gamma, or thrombopoietin.

[0891] In certain embodiments, Therapeutics of the present invention are administered in combination with adrenergic blockers, such as, for example, acebutolol, atenolol, betaxolol, bisoprolol, carteolol, labetalol, metoprolol, nadolol, oxprenolol, penbutolol, pindolol, propranolol, sotalol, and timolol.

[0892] In another embodiment, the Therapeutics of the invention are administered in combination with an antiarrhythmic drug (e.g., adenosine, amidoarone, bretylium, digitalis, digoxin, digitoxin, diliazem, disopyramide, esmolol, flecainide, lidocaine, mexiletine, moricizine, phenyloin, procainamide, N-acetyl procainamide, propafenone, propranolol, quinidine, sotalol, tocainide, and verapamil).

[0893] In another embodiment, the Therapeutics of the invention are administered in combination with diuretic agents, such as carbonic anhydrase-inhibiting agents (e.g., acetazolamide, dichlorphenamide, and methazolamide), osmotic diuretics (e.g., glycerin, isosorbide, mannitol, and urea), diuretics that inhibit Na⁺—K⁺-2Cl⁻ symport (e.g., furosemide, bumetanide, azosemide, piretanide, tripamide, ethacrynic acid, muzolimine, and torsemide), thiazide and thiazide-like diuretics (e.g., bendroflumethiazide, benzthiazide, chlorothiazide, hydrochlorothiazide, hydroflumethiazide, methyclothiazide, polythiazide, trichornethiazide, chlorthalidone, indapamide, metolazone, and quinethazone), potassium sparing diuretics (e.g., amiloride and triamterene), and mineralcorticoid receptor antagonists (e.g., spironolactone, canrenone, and potassium canrenoate).

[0894] In one embodiment, the Therapeutics of the invention are administered in combination with treatments for endocrine and/or hormone imbalance disorders. Treatments for endocrine and/or hormone imbalance disorders include, but are not limited to, ¹²⁷I, radioactive isotopes of iodine such as ¹³¹I and ¹²³I; recombinant growth hormone, such as HUMATROPE™ (recombinant somatropin); growth hormone analogs such as PROTROPIN™ (somatrem); dopamine agonists such as PARLODEL™ (bromocriptine); somatostatin analogs such as SANDOSTATIN™ (octreotide); gonadotropin preparations such as PREGNYL™, A.P.L.™ and PROFASI™ (chorionic gonadotropin (CG)), PERGONAL™ (menotropins), and METRODIN™ (urofollitropin (uFSH)); synthetic human gonadotropin releasing hormone preparations such as FACTREL™ and LUTREPULSE™ (gonadorelin hydrochloride); synthetic gonadotropin agonists such as LUPRON™ (leuprolide acetate), SUPPRELIN™ (histrelin acetate), SYNAREL™ (nafarelin acetate), and ZOLADEX™ (goserelin acetate); synthetic preparations of thyrotropin-releasing hormone such as RELEFACT TRH™ and THYPINONE™ (protirelin); recombinant human TSH such as THYROGEN™; synthetic preparations of the sodium salts of the natural isomers of thyroid hormones such as L-T₄™, SYNTHROID™ and LEVOTHROID™ (levothyroxine sodium), L-T₃™, CYTOMEL™ and TRIOSTAT™ (liothyroine sodium), and THYROLAR™ (liotrix); antithyroid compounds such as 6-n-propylthiouracil (propylthiouracil), 1-methyl-2-mercaptoimidazole and TAPAZOLE™ (methimazole), NEO-MERCAZOLE™ (carbimazole); beta-adrenergic receptor antagonists such as propranolol and esmolol; Ca²⁺ channel blockers; dexamethasone and iodinated radiological contrast agents such as TELEPAQUE™ (iopanoic acid) and ORAGRAFIN™ (sodium ipodate).

[0895] Additional treatments for endocrine and/or hormone imbalance disorders include, but are not limited to, estrogens or congugated estrogens such as ESTRACE™ (estradiol), ESTINYL™ (ethinyl estradiol), PREMARIN™, ESTRATAB™, ORTHO-EST™, OGEN™ and estropipate (estrone), ESTROVIS™ (quinestrol), ESTRADERM™ (estradiol), DELESTROGEN™ and VALERGEN™ (estradiol valerate), DEPO-ESTRADIOL CYPIONATE™ and ESTROJECT LA™ (estradiol cypionate); antiestrogens such as NOLVADEX™ (tamoxifen), SEROPHENE™ and CLOMID™ (clomiphene); progestins such as DURALUTIN™ (hydroxyprogesterone caproate), MPA™ and DEPO-PROVERA™ (medroxyprogesterone acetate), PROVERA™ and CYCRIN™ (MPA), MEGACE™ (megestrol acetate), NORLUTIN™ (norethindrone), and NORLUTATE™ and AYGESTIN™ (norethindrone acetate); progesterone implants such as NORPLANT SYSTEM™ (subdermal implants of norgestrel); antiprogestins such as RU 486™ (mifepristone); hormonal contraceptives such as ENOVID™ (norethynodrel plus mestranol), PROGESTASERT™ (intrauterine device that releases progesterone), LOESTRIN™, BREVICON™, MODICON™, GENORA™, NELONA™, NORINYL™, OVACON-35™ and OVACON-50™ (ethinyl estradiol/norethindrone), LEVLEN™, NORDETTE™, TRI-LEVLEN™ and TRIPHASIL-21™ (ethinyl estradiol/levonorgestrel) LO/OVRAL™ and OVRAL™ (ethinyl estradiol/norgestrel), DEMULEN™ (ethinyl estradiol/ethynodiol diacetate), NORINYL™, ORTHO-NOVUM™, NORETHIN™, GENORA™, and NELOVA™ (norethindrone/mestranol), DESOGEN™ and ORTHO-CEPT™ (ethinyl estradiol/desogestrel), ORTHO-CYCLEN™ and ORTHO-TRICYCLEN™ (ethinyl estradiol/norgestimate), MICRONOR™ and NOR-QD™ (norethindrone), and OVRETTE™ (norgestrel).

[0896] Additional treatments for endocrine and/or hormone imbalance disorders include, but are not limited to, testosterone esters such as methenolone acetate and testosterone undecanoate; parenteral and oral androgens such as TESTOJECT-50™ (testosterone), TESTEX™ (testosterone propionate), DELATESTRYL™ (testosterone enanthate), DEPO-TESTOSTERONE™ (testosterone cypionate), DANOCRINE™ (danazol), HALOTESTIN™ (fluoxymesterone), ORETON METHYL™, TESTRED™ and VIRILON™ (methyltestosterone), and OXANDRIN™ (oxandrolone); testosterone transdermal systems such as TESTODERM™; androgen receptor antagonist and 5-alpha-reductase inhibitors such as ANDROCUR™ (cyproterone acetate), EULEXIN™ (flutamide), and PROSCAR™ (finasteride); adrenocorticotropic hormone preparations such as CORTROSYN™ (cosyntropin); adrenocortical steroids and their synthetic analogs such as ACLOVATE™ (alclometasone dipropionate), CYCLOCORT™ (amcinonide), BECLOVENT™ and VANCERIL™ (beclomethasone dipropionate), CELESTONE™ (betamethasone), BENISONE™ and UTICORT™ (betamethasone benzoate), DIPROSONE™ (betamethasone dipropionate), CELESTONE PHOSPHATE™ (betamethasone sodium phosphate), CELESTONE SOLUSPAN™ (betamethasone sodium phosphate and acetate), BETA-VAL™ and VALISONE™ (betamethasone valerate), TEMOVATE™ (clobetasol propionate), CLODERM™ (clocortolone pivalate), CORTEF™ and HYDROCORTONE™ (cortisol (hydrocortisone)), HYDROCORTONE ACETATE™ (cortisol (hydrocortisone) acetate), LOCOID™ (cortisol (hydrocortisone) butyrate), HYDROCORTONE PHOSPHATE™ (cortisol (hydrocortisone) sodium phosphate), A-HYDROCORT™ and SOLU CORTEF™ (cortisol (hydrocortisone) sodium succinate), WESTCORT™ (cortisol (hydrocortisone) valerate), CORTISONE ACETATE™ (cortisone acetate), DESOWEN™ and TRIDESILON™ (desonide), TOPICORT™ (desoximetasone), DECADRON™ (dexamethasone), DECADRON LA™ (dexamethasone acetate), DECADRON PHOSPHATE™ and HEXADROL PHOSPHATE™ (dexamethasone sodium phosphate), FLORONE™ and MAXIFLOR™ (diflorasone diacetate), FLORINEF ACETATE™ (fludrocortisone acetate), AEROBID™ and NASALIDE™ (flunisolide), FLUONID™ and SYNALAR™ (fluocinolone acetonide), LIDEX™ (fluocinonide), FLUOR-OP™ and FML™ (fluorometholone), CORDRAN™ (flurandrenolide), HALOG™ (halcinonide), HMS LIZUIFILM™ (medrysone), MEDROL™ (methylprednisolone), DEPO-MEDROL™ and MEDROL ACETATE™ (methylprednisone acetate), A-METHAPRED™ and SOLUMEDROL™ (methylprednisolone sodium succinate), ELOCON™ (mometasone furoate), HALDRONE™ (paramethasone acetate), DELTA-CORTEF™ (prednisolone), ECONOPRED™ (prednisolone acetate), HYDELTRASOL™ (prednisolone sodium phosphate), HYDELTRA-T.B.A™ (prednisolone tebutate), DELTASONE™ (prednisone), ARISTOCORT™ and KENACORT™ (triamcinolone), KENALOG™ (triamcinolone acetonide), ARISTOCORT™ and KENACORT DIACETATE™ (triamcinolone diacetate), and ARISTOSPAN™ (triamcinolone hexacetonide); inhibitors of biosynthesis and action of adrenocortical steroids such as CYTADREN™ (aminoglutethimide), NIZORAL™ (ketoconazole), MODRASTANE™ (trilostane), and METOPIRONE™ (metyrapone); bovine, porcine or human insulin or mixtures thereof; insulin analogs; recombinant human insulin such as HUMULIN™ and NOVOLIN™; oral hypoglycemic agents such as ORAMIDE™ and ORINASE™ (tolbutamide), DIABINESE™ (chlorpropamide), TOLAMIDE™ and TOLINASE™ (tolazamide), DYMELOR™ (acetohexamide), glibenclamide, MICRONASE™, DIBETA™ and GLYNASE™ (glyburide), GLUCOTROL™ (glipizide), and DIAMICRON™ (gliclazide), GLUCOPHAGE™ (metformin), ciglitazone, pioglitazone, and alpha-glucosidase inhibitors; bovine or porcine glucagon; somatostatins such as SANDOSTATIN™ (octreotide); and diazoxides such as PROGLYCEM™ (diazoxide).

[0897] In an additional embodiment, the Therapeutics of the invention are administered in combination with drugs effective in treating iron deficiency and hypochromic anemias, including but not limited to, ferrous sulfate (iron sulfate, FEOSOL™), ferrous fumarate (e.g., FEOSTA™), ferrous gluconate (e.g., FERGON™), polysaccharide-iron complex (e.g., NIFEREX™), iron dextran injection (e.g., INFED™), cupric sulfate, pyroxidine, riboflavin, Vitamin B₁₂, cyancobalamin injection (e.g., REDISOL™, RUBRAMIN PC™), hydroxocobalamin, folic acid (e.g., FOLVITE™), leucovorin (folinic acid, 5-CHOH4PteGlu, citrovorum factor) or WELLCOVORIN (Calcium salt of leucovorin), transferrin or ferritin.

[0898] In another embodiment, Therapeutics of the invention are administered in combination with vasodilating agents and/or calcium channel blocking agents. Vasodilating agents that may be administered with the Therapeutics of the invention include, but are not limited to, Angiotensin Converting Enzyme (ACE) inhibitors (e.g., papaverine, isoxsuprine, benazepril, captopril, cilazapril, enalapril, enalaprilat, fosinopril, lisinopril, moexipril, perindopril, quinapril, ramipril, spirapril, trandolapril, and nylidrin), and nitrates (e.g., isosorbide dinitrate, isosorbide mononitrate, and nitroglycerin). Examples of calcium channel blocking agents that may be administered in combination with the Therapeutics of the invention include, but are not limited to amlodipine, bepridil, diltiazem, felodipine, flunarizine, isradipine, nicardipine, nifedipine, nimodipine, and verapamil.

[0899] In certain embodiments, the Therapeutics of the invention are administered in combination with treatments for gastrointestinal disorders. Treatments for gastrointestinal disorders that may be administered with the Therapeutic of the invention include, but are not limited to, H₂ histamine receptor antagonists (e.g., TAGAMET™ (cimetidine), ZANTAC™ (ranitidine), PEPCID™ (famotidine), and AXID™ (nizatidine)); inhibitors of H⁺, K⁺ ATPase (e.g., PREVACID™ (lansoprazole) and PRILOSEC™ (omeprazole)); Bismuth compounds (e.g., PEPTO-BISMOL™ (bismuth subsalicylate) and DE-NOL™ (bismuth subcitrate)); various antacids; sucralfate; prostaglandin analogs (e.g. CYTOTEC™ (misoprostol)); muscarinic cholinergic antagonists; laxatives (e.g., surfactant laxatives, stimulant laxatives, saline and osmotic laxatives); antidiarrheal agents (e.g., LOMOTIL™ (diphenoxylate), MOTOFEN™ (diphenoxin), and IMODIUM™ (loperamide hydrochloride)), synthetic analogs of somatostatin such as SANDOSTATIN™ (octreotide), antiemetic agents (e.g., ZOFRAN™ (ondansetron), KYTRIL™ (granisetron hydrochloride), tropisetron, dolasetron, metoclopramide, chlorpromazine, perphenazine, prochlorperazine, promethazine, thiethylperazine, triflupromazine, domperidone, haloperidol, droperidol, trimethobenzamide, dexamethasone, methylprednisolone, dronabinol, and nabilone); D2 antagonists (e.g., metoclopramide, trimethobenzamide and chlorpromazine); bile salts; chenodeoxycholic acid; ursodeoxycholic acid; and pancreatic enzyme preparations such as pancreatin and pancrelipase.

[0900] In additional embodiments, the Therapeutics of the invention are administered in combination with other therapeutic or prophylactic regimens, such as, for example, radiation therapy.

### Example 14

### Method of Treating Decreased Levels of the Polypeptide

[0901] The present invention relates to a method for treating an individual in need of an increased level of a polypeptide of the invention in the body comprising administering to such an individual a composition comprising a therapeutically effective amount of polypeptides (including agonists thereto), and/or antibodies of the invention. Moreover, it will be appreciated that conditions caused by a decrease in the standard or normal expression level of a polypeptide of the present invention in an individual may be treated by administering agonists of said polypeptide. Thus, the invention also provides a method of treatment of an individual in need of an increased level of the polypeptide comprising administering to such an individual a Therapeutic comprising an amount of the agonist (including polypeptides and antibodies of the present invention) to increase the activity level of the polypeptide in such an individual.

[0902] For example, a patient with decreased levels of a polypeptide receives a daily dose 0.1-100 ug/kg of the agonist for six consecutive days. The exact details of the dosing scheme, based on administration and formulation, are provided in Example 13.

### Example 15

### Method of Treating Increased Levels of the Polypeptide

[0903] The present invention also relates to a method of treating an individual in need of a decreased level of a polypeptide of the invention in the body comprising administering to such an individual a composition comprising a therapeutically effective amount of an antagonist of the invention (including polypeptides and antibodies of the invention).

[0904] In one example, antisense technology is used to inhibit production of a polypeptide of the present invention. This technology is one example of a method of decreasing levels of a polypeptide, due to a variety of etiologies, such as cancer.

[0905] For example, a patient diagnosed with abnormally increased levels of a polypeptide is administered intravenously antisense polynucleotides at 0.5, 1.0, 1.5, 2.0 and 3.0 mg/kg day for 21 days. This treatment is repeated after a 7-day rest period if the treatment was well tolerated. The antisense polynucleotides of the present invention can be formulated using techniques and formulations described herein (e.g. see Example 13), or otherwise known in the art.

### Example 16

### Method of Treatment Using Gene Therapy—Ex Vivo

[0906] One method of gene therapy transplants fibroblasts, which are capable of expressing a polypeptide, onto a patient. Generally, fibroblasts are obtained from a subject by skin biopsy. The resulting tissue is placed in tissue-culture medium and separated into small pieces. Small chunks of the tissue are placed on a wet surface of a tissue culture flask, approximately ten pieces are placed in each flask. The flask is turned upside down, closed tight and left at room temperature over night. After 24 hours at room temperature, the flask is inverted and the chunks of tissue remain fixed to the bottom of the flask and fresh media (e.g., Ham's F12 media, with 10% FBS, penicillin and streptomycin) is added. The flasks are then incubated at 37 degree C. for approximately one week.

[0907] At this time, fresh media is added and subsequently changed every several days. After an additional two weeks in culture, a monolayer of fibroblasts emerge. The monolayer is trypsinized and scaled into larger flasks.

[0908] pMV-7 (Kirschmeier, P. T. et al., DNA, 7:219-25 (1988)), flanked by the long terminal repeats of the Moloney murine sarcoma virus, is digested with EcoRI and HindIII and subsequently treated with calf intestinal phosphatase. The linear vector is fractionated on agarose gel and purified, using glass beads.

[0909] The cDNA encoding a polypeptide of the present invention can be amplified using PCR primers which correspond to the 5′ and 3′ end sequences respectively as set forth in Example 1 using primers and having appropriate restriction sites and initiation/stop codons, if necessary. Preferably, the 5′ primer contains an EcoRI site and the 3′ primer includes a HindIII site. Equal quantities of the Moloney murine sarcoma virus linear backbone and the amplified EcoRI and HindIII fragment are added together, in the presence of T4 DNA ligase. The resulting mixture is maintained under conditions appropriate for ligation of the two fragments. The ligation mixture is then used to transform bacteria HB101, which are then plated onto agar containing kanamycin for the purpose of confirming that the vector has the gene of interest properly inserted.

[0910] The amphotropic pA317 or GP+am12 packaging cells are grown in tissue culture to confluent density in Dulbecco's Modified Eagles Medium (DMEM) with 10% calf serum (CS), penicillin and streptomycin. The MSV vector containing the gene is then added to the media and the packaging cells transduced with the vector. The packaging cells now produce infectious viral particles containing the gene (the packaging cells are now referred to as producer cells).

[0911] Fresh media is added to the transduced producer cells, and subsequently, the media is harvested from a 10 cm plate of confluent producer cells. The spent media, containing the infectious viral particles, is filtered through a millipore filter to remove detached producer cells and this media is then used to infect fibroblast cells. Media is removed from a sub-confluent plate of fibroblasts and quickly replaced with the media from the producer cells. This media is removed and replaced with fresh media. If the titer of virus is high, then virtually all fibroblasts will be infected and no selection is required. If the titer is very low, then it is necessary to use a retroviral vector that has a selectable marker, such as neo or his. Once the fibroblasts have been efficiently infected, the fibroblasts are analyzed to determine whether protein is produced.

[0912] The engineered fibroblasts are then transplanted onto the host, either alone or after having been grown to confluence on cytodex 3 microcarrier beads.

### Example 17

### Gene Therapy Using Endogenous Genes Corresponding to Polynucleotides of the Invention

[0913] Another method of gene therapy according to the present invention involves operably associating the endogenous polynucleotide sequence of the invention with a promoter via homologous recombination as described, for example, in U.S. Pat. No. 5,641,670, issued Jun. 24, 1997; International Publication NO: WO 96/29411, published Sep. 26, 1996; International Publication NO: WO 94/12650, published Aug. 4, 1994; Koller et al., Proc. Natl. Acad. Sci. USA, 86:8932-8935 (1989); and Zijlstra et al., Nature, 342:435-438 (1989). This method involves the activation of a gene which is present in the target cells, but which is not expressed in the cells, or is expressed at a lower level than desired.

[0914] Polynucleotide constructs are made which contain a promoter and targeting sequences, which are homologous to the 5′ non-coding sequence of endogenous polynucleotide sequence, flanking the promoter. The targeting sequence will be sufficiently near the 5′ end of the polynucleotide sequence so the promoter will be operably linked to the endogenous sequence upon homologous recombination. The promoter and the targeting sequences can be amplified using PCR. Preferably, the amplified promoter contains distinct restriction enzyme sites on the 5′ and 3′ ends. Preferably, the 3′ end of the first targeting sequence contains the same restriction enzyme site as the 5′ end of the amplified promoter and the 5′ end of the second targeting sequence contains the same restriction site as the 3′ end of the amplified promoter.

[0915] The amplified promoter and the amplified targeting sequences are digested with the appropriate restriction enzymes and subsequently treated with calf intestinal phosphatase. The digested promoter and digested targeting sequences are added together in the presence of T4 DNA ligase. The resulting mixture is maintained under conditions appropriate for ligation of the two fragments. The construct is size fractionated on an agarose gel, then purified by phenol extraction and ethanol precipitation.

[0916] In this Example, the polynucleotide constructs are administered as naked polynucleotides via electroporation. However, the polynucleotide constructs may also be administered with transfection-facilitating agents, such as liposomes, viral sequences, viral particles, precipitating agents, etc. Such methods of delivery are known in the art.

[0917] Once the cells are transfected, homologous recombination will take place which results in the promoter being operably linked to the endogenous polynucleotide sequence. This results in the expression of polynucleotide corresponding to the polynucleotide in the cell. Expression may be detected by immunological staining, or any other method known in the art.

[0918] Fibroblasts are obtained from a subject by skin biopsy. The resulting tissue is placed in DMEM+10% fetal calf serum. Exponentially growing or early stationary phase fibroblasts are trypsinized and rinsed from the plastic surface with nutrient medium. An aliquot of the cell suspension is removed for counting, and the remaining cells are subjected to centrifugation. The supernatant is aspirated and the pellet is resuspended in 5 ml of electroporation buffer (20 mM HEPES pH 7.3, 137 mM NaCl, 5 mM KCl, 0.7 mM Na₂ HPO₄, 6 mM dextrose). The cells are recentrifuged, the supernatant aspirated, and the cells resuspended in electroporation buffer containing 1 mg/ml acetylated bovine serum albumin. The final cell suspension contains approximately 3×10⁶ cells/ml. Electroporation should be performed immediately following resuspension.

[0919] Plasmid DNA is prepared according to standard techniques. For example, to construct a plasmid for targeting to the locus corresponding to the polynucleotide of the invention, plasmid pUC18 (MBI Fermentas, Amherst, N.Y.) is digested with HindIII. The CMV promoter is amplified by PCR with an XbaI site on the 5′ end and a BamHI site on the 3′ end. Two non-coding sequences are amplified via PCR: one non-coding sequence (fragment 1) is amplified with a HindIII site at the 5′ end and an Xba site at the 3′end; the other non-coding sequence (fragment 2) is amplified with a BamHI site at the 5′end and a HindIII site at the 3′end. The CMV promoter and the fragments (1 and 2) are digested with the appropriate enzymes (CMV promoter—XbaI and BamHI; fragment 1—XbaI; fragment 2—BamHI) and ligated together. The resulting ligation product is digested with HindIII, and ligated with the HindIII-digested pUC 18 plasmid.

[0920] Plasmid DNA is added to a sterile cuvette with a 0.4 cm electrode gap (Bio-Rad). The final DNA concentration is generally at least 120 μg/ml. 0.5 ml of the cell suspension (containing approximately 1.5×10⁶ cells) is then added to the cuvette, and the cell suspension and DNA solutions are gently mixed. Electroporation is performed with a Gene-Pulser apparatus (Bio-Rad). Capacitance and voltage are set at 960 μF and 250-300 V, respectively. As voltage increases, cell survival decreases, but the percentage of surviving cells that stably incorporate the introduced DNA into their genome increases dramatically. Given these parameters, a pulse time of approximately 14-20 mSec should be observed.

[0921] Electroporated cells are maintained at room temperature for approximately 5 min, and the contents of the cuvette are then gently removed with a sterile transfer pipette. The cells are added directly to 10 ml of prewarmed nutrient media (DMEM with 15% calf serum) in a 10 cm dish and incubated at 37 degree C. The following day, the media is aspirated and replaced with 10 ml of fresh media and incubated for a further 16-24 hours.

[0922] The engineered fibroblasts are then injected into the host, either alone or after having been grown to confluence on cytodex 3 microcarrier beads. The fibroblasts now produce the protein product. The fibroblasts can then be introduced into a patient as described above.

### Example 18

### Method of Treatment Using Gene Therapy—In Vivo

[0923] Another aspect of the present invention is using in vivo gene therapy methods to prevent, treat, and/or ameliorate allergic and/or asthmatic diseases and disorders. The gene therapy method relates to the introduction of naked nucleic acid (DNA, RNA, and antisense DNA or RNA) sequences into an animal to increase or decrease the expression of the polypeptide. The polynucleotide of the present invention may be operatively linked to (i.e., associated with) a promoter or any other genetic elements necessary for the expression of the polypeptide by the target tissue. Such gene therapy and delivery techniques and methods are known in the art, see, for example, WO90/11092, WO98/11779; U.S. Pat. Nos. 5,693,622, 5,705,151, 5,580,859; Tabata et al., Cardiovasc. Res. 35(3):470-479 (1997); Chao et al., Pharmacol. Res. 35(6):517-522 (1997); Wolff, Neuromuscul. Disord. 7(5):314-318 (1997); Schwartz et al., Gene Ther. 3(5):405-411 (1996); Tsurumi et al., Circulation 94(12):3281-3290 (1996) (incorporated herein by reference).

[0924] The polynucleotide constructs may be delivered by any method that delivers injectable materials to the cells of an animal, such as, injection into the interstitial space of tissues (heart, muscle, skin, lung, liver, intestine and the like). The polynucleotide constructs can be delivered in a pharmaceutically acceptable liquid or aqueous carrier.

[0925] The term “naked” polynucleotide, DNA or RNA, refers to sequences that are free from any delivery vehicle that acts to assist, promote, or facilitate entry into the cell, including viral sequences, viral particles, liposome formulations, lipofectin or precipitating agents and the like. However, the polynucleotides of the present invention may also be delivered in liposome formulations (such as those taught in Feigner P. L. et al. (1995) Ann. NY Acad. Sci. 772:126-139 and Abdallah B. et al. (1995) Biol. Cell 85(1):1-7) which can be prepared by methods well known to those skilled in the art.

[0926] The polynucleotide vector constructs used in the gene therapy method are preferably constructs that will not integrate into the host genome nor will they contain sequences that allow for replication. Any strong promoter known to those skilled in the art can be used for driving the expression of DNA. Unlike other gene therapy techniques, one major advantage of introducing naked nucleic acid sequences into target cells is the transitory nature of the polynucleotide synthesis in the cells. Studies have shown that non-replicating DNA sequences can be introduced into cells to provide production of the desired polypeptide for periods of up to six months.

[0927] The polynucleotide construct can be delivered to the interstitial space of tissues within an animal, including muscle, skin, brain, lung, liver, spleen, bone marrow, thymus, heart, lymph, blood, bone, cartilage, pancreas, kidney, gall bladder, stomach, intestine, testis, ovary, uterus, rectum, nervous system, eye, gland, and connective tissue. Interstitial space of the tissues comprises the intercellular fluid, mucopolysaccharide matrix among the reticular fibers of organ tissues, elastic fibers in the walls of vessels or chambers, collagen fibers of fibrous tissues, or that same matrix within connective tissue ensheathing muscle cells or in the lacunae of bone. It is similarly the space occupied by the plasma of the circulation and the lymph fluid of the lymphatic channels. Delivery to the interstitial space of muscle tissue is preferred for the reasons discussed below. They may be conveniently delivered by injection into the tissues comprising these cells. They are preferably delivered to and expressed in persistent, non-dividing cells which are differentiated, although delivery and expression may be achieved in non-differentiated or less completely differentiated cells, such as, for example, stem cells of blood or skin fibroblasts. In vivo muscle cells are particularly competent in their ability to take up and express polynucleotides.

[0928] For the naked polynucleotide injection, an effective dosage amount of DNA or RNA will be in the range of from about 0.05 g/kg body weight to about 50 mg/kg body weight. Preferably the dosage will be from about 0.005 mg/kg to about 20 mg/kg and more preferably from about 0.05 mg/kg to about 5 mg/kg. Of course, as the artisan of ordinary skill will appreciate, this dosage will vary according to the tissue site of injection. The appropriate and effective dosage of nucleic acid sequence can readily be determined by those of ordinary skill in the art and may depend on the condition being treated and the route of administration. The preferred route of administration is by the parenteral route of injection into the interstitial space of tissues. However, other parenteral routes may also be used, such as, inhalation of an aerosol formulation particularly for delivery to lungs or bronchial tissues, throat or mucous membranes of the nose. In addition, naked polynucleotide constructs can be delivered to arteries during angioplasty by the catheter used in the procedure.

[0929] The dose response effects of injected polynucleotide in muscle in vivo is determined as follows. Suitable template DNA for production of mRNA coding for polypeptide of the present invention is prepared in accordance with a standard recombinant DNA methodology. The template DNA, which may be either circular or linear, is either used as naked DNA or complexed with liposomes. The quadriceps muscles of mice are then injected with various amounts of the template DNA.

[0930] Five to six week old female and male Balb/C mice are anesthetized by intraperitoneal injection with 0.3 ml of 2.5% Avertin. A 1.5 cm incision is made on the anterior thigh, and the quadriceps muscle is directly visualized. The template DNA is injected in 0.1 ml of carrier in a 1 cc syringe through a 27 gauge needle over one minute, approximately 0.5 cm from the distal insertion site of the muscle into the knee and about 0.2 cm deep. A suture is placed over the injection site for future localization, and the skin is closed with stainless steel clips.

[0931] After an appropriate incubation time (e.g., 7 days) muscle extracts are prepared by excising the entire quadriceps. Every fifth 15 um cross-section of the individual quadriceps muscles is histochemically stained for protein expression. A time course for protein expression may be done in a similar fashion except that quadriceps from different mice are harvested at different times. Persistence of DNA in muscle following injection may be determined by Southern blot analysis after preparing total cellular DNA and HIRT supernatants from injected and control mice. The results of the above experimentation in mice can be used to extrapolate proper dosages and other treatment parameters in humans and other animals using naked DNA.

### Example 19

### Transgenic Animals

[0932] The polypeptides of the invention can also be expressed in transgenic animals. Animals of any species, including, but not limited to, mice, rats, rabbits, hamsters, guinea pigs, pigs, micro-pigs, goats, sheep, cows and non-human primates, e.g., baboons, monkeys, and chimpanzees may be used to generate transgenic animals. In a specific embodiment, techniques described herein or otherwise known in the art, are used to express polypeptides of the invention in humans, as part of a gene therapy protocol.

[0933] Any technique known in the art may be used to introduce the transgene (i.e., polynucleotides of the invention) into animals to produce the founder lines of transgenic animals. Such techniques include, but are not limited to, pronuclear microinjection (Paterson et al., Appl. Microbiol. Biotechnol. 40:691-698 (1994); Carver et al., Biotechnology (NY) 11:1263-1270 (1993); Wright et al., Biotechnology (NY) 9:830-834 (1991); and Hoppe et al., U.S. Pat. No. 4,873,191 (1989)); retrovirus mediated gene transfer into germ lines (Van der Putten et al., Proc. Natl. Acad. Sci., USA 82:6148-6152 (1985)), blastocysts or embryos; gene targeting in embryonic stem cells (Thompson et al., Cell 56:313-321 (1989)); electroporation of cells or embryos (Lo, 1983, Mol Cell. Biol. 3:1803-1814 (1983)); introduction of the polynucleotides of the invention using a gene gun (see, e.g., Ulmer et al., Science 259:1745 (1993); introducing nucleic acid constructs into embryonic pleuripotent stem cells and transferring the stem cells back into the blastocyst; and sperm-mediated gene transfer (Lavitrano et al., Cell 57:717-723 (1989); etc. For a review of such techniques, see Gordon, “Transgenic Animals,” Intl. Rev. Cytol. 115:171-229 (1989), which is incorporated by reference herein in its entirety.

[0934] Any technique known in the art may be used to produce transgenic clones containing polynucleotides of the invention, for example, nuclear transfer into enucleated oocytes of nuclei from cultured embryonic, fetal, or adult cells induced to quiescence (Campell et al., Nature 380:64-66 (1996); Wilmut et al., Nature 385:810-813 (1997)).

[0935] The present invention provides for transgenic animals that carry the transgene in all their cells, as well as animals which carry the transgene in some, but not all their cells, i.e., mosaic animals or chimeric. The transgene may be integrated as a single transgene or as multiple copies such as in concatamers, e.g., head-to-head tandems or head-to-tail tandems. The transgene may also be selectively introduced into and activated in a particular cell type by following, for example, the teaching of Lasko et al. (Lasko et al., Proc. Natl. Acad. Sci. USA 89:6232-6236 (1992)). The regulatory sequences required for such a cell-type specific activation will depend upon the particular cell type of interest, and will be apparent to those of skill in the art. When it is desired that the polynucleotide transgene be integrated into the chromosomal site of the endogenous gene, gene targeting is preferred. Briefly, when such a technique is to be utilized, vectors containing some nucleotide sequences homologous to the endogenous gene are designed for the purpose of integrating, via homologous recombination with chromosomal sequences, into and disrupting the function of the nucleotide sequence of the endogenous gene. The transgene may also be selectively introduced into a particular cell type, thus inactivating the endogenous gene in only that cell type, by following, for example, the teaching of Gu et al. (Gu et al., Science 265:103-106 (1994)). The regulatory sequences required for such a cell-type specific inactivation will depend upon the particular cell type of interest, and will be apparent to those of skill in the art.

[0936] Once transgenic animals have been generated, the expression of the recombinant gene may be assayed utilizing standard techniques. Initial screening may be accomplished by Southern blot analysis or PCR techniques to analyze animal tissues to verify that integration of the transgene has taken place. The level of mRNA expression of the transgene in the tissues of the transgenic animals may also be assessed using techniques which include, but are not limited to, Northern blot analysis of tissue samples obtained from the animal, in situ hybridization analysis, and reverse transcriptase-PCR (rt-PCR). Samples of transgenic gene-expressing tissue may also be evaluated immunocytochemically or immunohistochemically using antibodies specific for the transgene product.

[0937] Once the founder animals are produced, they may be bred, inbred, outbred, or crossbred to produce colonies of the particular animal. Examples of such breeding strategies include, but are not limited to: outbreeding of founder animals with more than one integration site in order to establish separate lines; inbreeding of separate lines in order to produce compound transgenics that express the transgene at higher levels because of the effects of additive expression of each transgene; crossing of heterozygous transgenic animals to produce animals homozygous for a given integration site in order to both augment expression and eliminate the need for screening of animals by DNA analysis; crossing of separate homozygous lines to produce compound heterozygous or homozygous lines; and breeding to place the transgene on a distinct background that is appropriate for an experimental model of interest.

[0938] Transgenic animals of the invention have uses which include, but are not limited to, animal model systems useful in elaborating the biological function of polypeptides of the present invention, studying conditions and/or disorders associated with aberrant expression, and in screening for compounds effective in ameliorating such conditions and/or disorders.

### Example 20

### Knock-Out Animals

[0939] Endogenous gene expression can also be reduced by inactivating or “knocking out” the gene and/or its promoter using targeted homologous recombination. (e.g., see Smithies et al., Nature 317:230-234 (1985); Thomas & Capecchi, Cell 51:503-512 (1987); Thompson et al., Cell 5:313-321 (1989); each of which is incorporated by reference herein in its entirety). For example, a mutant, non-functional polynucleotide of the invention (or a completely unrelated DNA sequence) flanked by DNA homologous to the endogenous polynucleotide sequence (either the coding regions or regulatory regions of the gene) can be used, with or without a selectable marker and/or a negative selectable marker, to transfect cells that express polypeptides of the invention in vivo. In another embodiment, techniques known in the art are used to generate knockouts in cells that contain, but do not express the gene of interest. Insertion of the DNA construct, via targeted homologous recombination, results in inactivation of the targeted gene. Such approaches are particularly suited in research and agricultural fields where modifications to embryonic stem cells can be used to generate animal offspring with an inactive targeted gene (e.g., see Thomas & Capecchi 1987 and Thompson 1989, supra). However this approach can be routinely adapted for use in humans provided the recombinant DNA constructs are directly administered or targeted to the required site in vivo using appropriate viral vectors that will be apparent to those of skill in the art.

[0940] In further embodiments of the invention, cells that are genetically engineered to express the polypeptides of the invention, or alternatively, that are genetically engineered not to express the polypeptides of the invention (e.g., knockouts) are administered to a patient in vivo. Such cells may be obtained from the patient (i.e., animal, including human) or an MHC compatible donor and can include, but are not limited to fibroblasts, bone marrow cells, blood cells (e.g., lymphocytes), adipocytes, muscle cells, endothelial cells etc. The cells are genetically engineered in vitro using recombinant DNA techniques to introduce the coding sequence of polypeptides of the invention into the cells, or alternatively, to disrupt the coding sequence and/or endogenous regulatory sequence associated with the polypeptides of the invention, e.g., by transduction (using viral vectors, and preferably vectors that integrate the transgene into the cell genome) or transfection procedures, including, but not limited to, the use of plasmids, cosmids, YACs, naked DNA, electroporation, liposomes, etc. The coding sequence of the polypeptides of the invention can be placed under the control of a strong constitutive or inducible promoter or promoter/enhancer to achieve expression, and preferably secretion, of the polypeptides of the invention. The engineered cells which express and preferably secrete the polypeptides of the invention can be introduced into the patient systemically, e.g., in the circulation, or intraperitoneally.

[0941] Alternatively, the cells can be incorporated into a matrix and implanted in the body, e.g., genetically engineered fibroblasts can be implanted as part of a skin graft; genetically engineered endothelial cells can be implanted as part of a lymphatic or vascular graft. (See, for example, Anderson et al. U.S. Pat. No. 5,399,349; and Mulligan & Wilson, U.S. Pat. No. 5,460,959 each of which is incorporated by reference herein in its entirety).

[0942] When the cells to be administered are non-autologous or non-MHC compatible cells, they can be administered using well known techniques which prevent the development of a host immune response against the introduced cells. For example, the cells may be introduced in an encapsulated form which, while allowing for an exchange of components with the immediate extracellular environment, does not allow the introduced cells to be recognized by the host immune system.

[0943] Transgenic and “knock-out” animals of the invention have uses which include, but are not limited to, animal model systems useful in elaborating the biological function of polypeptides of the present invention, studying conditions and/or disorders associated with aberrant expression, and in screening for compounds effective in ameliorating such conditions and/or disorders.

### Example 21

### Assays Detecting Stimulation or Inhibition of B cell Proliferation and Differentiation

[0944] Generation of functional humoral immune responses requires both soluble and cognate signaling between B-lineage cells and their microenvironment. Signals may impart a positive stimulus that allows a B-lineage cell to continue its programmed development, or a negative stimulus that instructs the cell to arrest its current developmental pathway. To date, numerous stimulatory and inhibitory signals have been found to influence B cell responsiveness including IL-2, IL-4, IL-5, IL-6, IL-7, IL10, IL-13, IL-14 and IL-15. Interestingly, these signals are by themselves weak effectors but can, in combination with various co-stimulatory proteins, induce activation, proliferation, differentiation, homing, tolerance and death among B cell populations.

[0945] One of the best studied classes of B-cell co-stimulatory proteins is the TNF-superfamily. Within this family CD40, CD27, and CD30 along with their respective ligands CD154, CD70, and CD153 have been found to regulate a variety of immune responses. Assays which allow for the detection and/or observation of the proliferation and differentiation of these B-cell populations and their precursors are valuable tools in determining the effects various proteins may have on these B-cell populations in terms of proliferation and differentiation. Listed below are two assays designed to allow for the detection of the differentiation, proliferation, or inhibition of B-cell populations and their precursors.

[0946] In Vitro Assay—Agonists or antagonists of the invention can be assessed for its ability to induce activation, proliferation, differentiation or inhibition and/or death in B-cell populations and their precursors. The activity of the agonists or antagonists of the invention on purified human tonsillar B cells, measured qualitatively over the dose range from 0.1 to 10,000 ng/mL, is assessed in a standard B-lymphocyte co-stimulation assay in which purified tonsillar B cells are cultured in the presence of either formalin-fixed Staphylococcus aureus Cowan I (SAC) or immobilized anti-human IgM antibody as the priming agent. Second signals such as IL-2 and IL-15 synergize with SAC and IgM crosslinking to elicit B cell proliferation as measured by tritiated-thymidine incorporation. Novel synergizing agents can be readily identified using this assay. The assay involves isolating human tonsillar B cells by magnetic bead (MACS) depletion of CD3-positive cells. The resulting cell population is greater than 95% B cells as assessed by expression of CD45R(B220).

[0947] Various dilutions of each sample are placed into individual wells of a 96-well plate to which are added 10⁵ B-cells suspended in culture medium (RPMI 1640 containing 10% FBS, 5×10⁻⁵M 2ME, 100 U/ml penicillin, 10 ug/ml streptomycin, and 10⁻⁵ dilution of SAC) in a total volume of 150 ul. Proliferation or inhibition is quantitated by a 20 h pulse (1 uCi/well) with 3H-thymidine (6.7 Ci/mM) beginning 72 h post factor addition. The positive and negative controls are IL2 and medium respectively.

[0948] In vivo Assay—BALB/c mice are injected (i.p.) twice per day with buffer only, or 2 mg/Kg of agonists or antagonists of the invention, or truncated forms thereof. Mice receive this treatment for 4 consecutive days, at which time they are sacrificed and various tissues and serum collected for analyses. Comparison of H&E sections from normal spleens and spleens treated with agonists or antagonists of the invention identify the results of the activity of the agonists or antagonists on spleen cells, such as the diffusion of peri-arterial lymphatic sheaths, and/or significant increases in the nucleated cellularity of the red pulp regions, which may indicate the activation of the differentiation and proliferation of B-cell populations. Immunohistochemical studies using a B cell marker, anti-CD45R(B220), are used to determine whether any physiological changes to splenic cells, such as splenic disorganization, are due to increased B-cell representation within loosely defined B-cell zones that infiltrate established T-cell regions.

[0949] Flow cytometric analyses of the spleens from mice treated with agonist or antagonist is used to indicate whether the agonists or antagonists specifically increases the proportion of ThB+, CD45R(B220)dull B cells over that which is observed in control mice.

[0950] Likewise, a predicted consequence of increased mature B-cell representation in vivo is a relative increase in serum Ig titers. Accordingly, serum IgM and IgA levels are compared between buffer and agonists or antagonists-treated mice.

[0951] The studies described in this example tested activity of agonists or antagonists of the invention. However, one skilled in the art could easily modify the exemplified studies to test the activity of polynucleotides or polypeptides of the invention (e.g., gene therapy).

### Example 22

### T Cell Proliferation Assay

[0952] A CD3-induced proliferation assay is performed on PBMCs and is measured by the uptake of ³H-thymidine. The assay is performed as follows. Ninety-six well plates are coated with 100 μl/well of mAb to CD3 (HIT3a, Pharmingen) or isotype-matched control mAb (B33.1) overnight at 4 degrees C. (1 μg/ml in 0.05M bicarbonate buffer, pH 9.5), then washed three times with PBS. PBMC are isolated by F/H gradient centrifugation from human peripheral blood and added to quadruplicate wells (5×10⁴/well) of mAb coated plates in RPMI containing 10% FCS and P/S in the presence of varying concentrations of agonists or antagonists of the invention (total volume 200 ul). Relevant protein buffer and medium alone are controls. After 48 hr. culture at 37 degrees C., plates are spun for 2 min. at 1000 rpm and 100 μl of supernatant is removed and stored −20 degrees C. for measurement of IL-2 (or other cytokines) if effect on proliferation is observed. Wells are supplemented with 100 ul of medium containing 0.5 uCi of ³H-thymidine and cultured at 37 degrees C. for 18-24 hr. Wells are harvested and incorporation of ³H-thymidine used as a measure of proliferation. Anti-CD3 alone is the positive control for proliferation. IL-2 (100 U/ml) is also used as a control which enhances proliferation. Control antibody which does not induce proliferation of T cells is used as the negative control for the effects of agonists or antagonists of the invention.

[0953] The studies described in this example tested activity of agonists or antagonists of the invention. However, one skilled in the art could easily modify the exemplified studies to test the activity of polynucleotides or polypeptides of the invention (e.g., gene therapy).

### Example 23

### Effect of Agonists or Antagonists of the Invention on the Expression of MHC Class II, Costimulatory and Adhesion Molecules and Cell Differentiation of Monocytes and Monocyte-Derived Human Dendritic Cells

[0954] Dendritic cells are generated by the expansion of proliferating precursors found in the peripheral blood: adherent PBMC or elutriated monocytic fractions are cultured for 7-10 days with GM-CSF (50 ng/ml) and IL-4 (20 ng/ml). These dendritic cells have the characteristic phenotype of immature cells (expression of CD1, CD80, CD86, CD40 and MHC class II antigens). Treatment with activating factors, such as TNF-α, causes a rapid change in surface phenotype (increased expression of MHC class I and II, costimulatory and adhesion molecules, downregulation of FCγRII, upregulation of CD83). These changes correlate with increased antigen-presenting capacity and with functional maturation of the dendritic cells.

[0955] FACS analysis of surface antigens is performed as follows. Cells are treated 1-3 days with increasing concentrations of agonist or antagonist of the invention or LPS (positive control), washed with PBS containing 1% BSA and 0.02 mM sodium azide, and then incubated with 1:20 dilution of appropriate FITC- or PE-labeled monoclonal antibodies for 30 minutes at 4 degrees C. After an additional wash, the labeled cells are analyzed by flow cytometry on a FACScan (Becton Dickinson).

[0956] Effect on the production of cytokines. Cytokines generated by dendritic cells, in particular IL-12, are important in the initiation of T-cell dependent immune responses. IL-12 strongly influences the development of Thl helper T-cell immune response, and induces cytotoxic T and NK cell function. An ELISA is used to measure the IL-12 release as follows. Dendritic cells (10⁶/ml) are treated with increasing concentrations of agonists or antagonists of the invention for 24 hours. LPS (100 ng/ml) is added to the cell culture as positive control. Supernatants from the cell cultures are then collected and analyzed for IL-12 content using commercial ELISA kit (e.g., R & D Systems (Minneapolis, Minn.)). The standard protocols provided with the kits are used.

[0957] Effect on the expression of MHC Class II, costimulatory and adhesion molecules. Three major families of cell surface antigens can be identified on monocytes: adhesion molecules, molecules involved in antigen presentation, and Fc receptor. Modulation of the expression of MHC class II antigens and other costimulatory molecules, such as B7 and ICAM-1, may result in changes in the antigen presenting capacity of monocytes and ability to induce T cell activation. Increased expression of Fc receptors may correlate with improved monocyte cytotoxic activity, cytokine release and phagocytosis.

[0958] FACS analysis is used to examine the surface antigens as follows. Monocytes are treated 1-5 days with increasing concentrations of agonists or antagonists of the invention or LPS (positive control), washed with PBS containing 1% BSA and 0.02 mM sodium azide, and then incubated with 1:20 dilution of appropriate FITC- or PE-labeled monoclonal antibodies for 30 minutes at 4 degrees C. After an additional wash, the labeled cells are analyzed by flow cytometry on a FACScan (Becton Dickinson).

[0959] Monocyte activation and/or increased survival. Assays for molecules that activate (or alternatively, inactivate) monocytes and/or increase monocyte survival (or alternatively, decrease monocyte survival) are known in the art and may routinely be applied to determine whether a molecule of the invention functions as an inhibitor or activator of monocytes. Agonists or antagonists of the invention can be screened using the three assays described below. For each of these assays, Peripheral blood mononuclear cells (PBMC) are purified from single donor leukopacks (American Red Cross, Baltimore, Md.) by centrifugation through a Histopaque gradient (Sigma). Monocytes are isolated from PBMC by counterflow centrifugal elutriation.

[0960] Monocyte Survival Assay. Human peripheral blood monocytes progressively lose viability when cultured in absence of serum or other stimuli. Their death results from internally regulated processes (apoptosis). Addition to the culture of activating factors, such as TNF-alpha dramatically improves cell survival and prevents DNA fragmentation. Propidium iodide (PI) staining is used to measure apoptosis as follows. Monocytes are cultured for 48 hours in polypropylene tubes in serum-free medium (positive control), in the presence of 100 ng/ml TNF-alpha (negative control), and in the presence of varying concentrations of the compound to be tested. Cells are suspended at a concentration of 2×10⁶/ml in PBS containing PI at a final concentration of 5 μg/ml, and then incubated at room temperature for 5 minutes before FACScan analysis. PI uptake has been demonstrated to correlate with DNA fragmentation in this experimental paradigm.

[0961] Effect on cytokine release. An important function of monocytes/macrophages is their regulatory activity on other cellular populations of the immune system through the release of cytokines after stimulation. An ELISA to measure cytokine release is performed as follows. Human monocytes are incubated at a density of 5×10⁵ cells/ml with increasing concentrations of agonists or antagonists of the invention and under the same conditions, but in the absence of agonists or antagonists. For IL-12 production, the cells are primed overnight with IFN (100 U/ml) in the presence of agonist or antagonist of the invention. LPS (10 ng/ml) is then added. Conditioned media are collected after 24 h and kept frozen until use. Measurement of TNF-alpha, IL-10, MCP-1 and IL-8 is then performed using a commercially available ELISA kit (e.g., R & D Systems (Minneapolis, Minn.)) and applying the standard protocols provided with the kit.

[0962] Oxidative burst. Purified monocytes are plated in 96-w plate at 2-×10⁵ cell/well. Increasing concentrations of agonists or antagonists of the invention are added to the wells in a total volume of 0.2 ml culture medium (RPMI 1640+10% FCS, glutamine and antibiotics). After 3 days incubation, the plates are centrifuged and the medium is removed from the wells. To the macrophage monolayers, 0.2 ml per well of phenol red solution (140 mM NaCl, 10 mM potassium phosphate buffer pH 7.0, 5.5 mM dextrose, 0.56 mM phenol red and 19 U/ml of HRPO) is added, together with the stimulant (200 nM PMA). The plates are incubated at 37° C. for 2 hours and the reaction is stopped by adding 20 μl 1N NaOH per well. The absorbance is read at 610 nm. To calculate the amount of H₂O₂ produced by the macrophages, a standard curve of a H₂O₂ solution of known molarity is performed for each experiment.

[0963] The studies described in this example tested activity of agonists or antagonists of the invention. However, one skilled in the art could easily modify the exemplified studies to test the activity of polynucleotides or polypeptides of the invention (e.g., gene therapy).

### Example 24

### Suppression of TNF Alpha-Induced Adhesion Molecule Expression by an Agonist or Antagonist of the Invention

[0964] The recruitment of lymphocytes to areas of inflammation and angiogenesis involves specific receptor-ligand interactions between cell surface adhesion molecules (CAMs) on lymphocytes and the vascular endothelium. The adhesion process, in both normal and pathological settings, follows a multi-step cascade that involves intercellular adhesion molecule-1 (ICAM-1), vascular cell adhesion molecule-1 (VCAM-1), and endothelial leukocyte adhesion molecule-1 (E-selectin) expression on endothelial cells (EC). The expression of these molecules and others on the vascular endothelium determines the efficiency with which leukocytes may adhere to the local vasculature and extravasate into the local tissue during the development of an inflammatory response. The local concentration of cytokines and growth factor participate in the modulation of the expression of these CAMs.

[0965] Tumor necrosis factor alpha (TNF-a), a potent proinflammatory cytokine, is a stimulator of all three CAMs on endothelial cells and may be involved in a wide variety of inflammatory responses, often resulting in a pathological outcome.

[0966] The potential of an agonist or antagonist of the invention to mediate a suppression of TNF-a induced CAM expression can be examined. A modified ELISA assay which uses ECs as a solid phase absorbent is employed to measure the amount of CAM expression on TNF-a treated ECs when co-stimulated with a member of the FGF family of proteins.

[0967] To perform the experiment, human umbilical vein endothelial cell (HUVEC) cultures are obtained from pooled cord harvests and maintained in growth medium (EGM-2; Clonetics, San Diego, Calif.) supplemented with 10% FCS and 1% penicillin/streptomycin in a 37 degree C. humidified incubator containing 5% CO₂. HUVECs are seeded in 96-well plates at concentrations of 1×10⁴ cells/well in EGM medium at 37 degree C. for 18-24 hrs or until confluent. The monolayers are subsequently washed 3 times with a serum-free solution of RPMI-1640 supplemented with 100 U/ml penicillin and 100 mg/ml streptomycin, and treated with a given cytokine and/or growth factor(s) for 24 h at 37 degree C. Following incubation, the cells are then evaluated for CAM expression.

[0968] Human Umbilical Vein Endothelial cells (HUVECs) are grown in a standard 96 well plate to confluence. Growth medium is removed from the cells and replaced with 90 ul of 199 Medium (10% FBS). Samples for testing and positive or negative controls are added to the plate in triplicate (in 10 ul volumes). Plates are incubated at 37 degree C. for either 5 h (selectin and integrin expression) or 24 h (integrin expression only). Plates are aspirated to remove medium and 100 μl of 0.1% paraformaldehyde-PBS (with Ca++ and Mg++) is added to each well. Plates are held at 4° C. for 30 min.

[0969] Fixative is then removed from the wells and wells are washed 1× with PBS(+Ca,Mg)+0.5% BSA and drained. Do not allow the wells to dry. Add 10 μl of diluted primary antibody to the test and control wells. Anti-ICAM-1-Biotin, Anti-VCAM-1-Biotin and Anti-E-selectin-Biotin are used at a concentration of 10 μg/ml (1:10 dilution of 0.1 mg/ml stock antibody). Cells are incubated at 37° C. for 30 min. in a humidified environment. Wells are washed ×3 with PBS(+Ca,Mg)+0.5% BSA.

[0970] Then add 20 μl of diluted ExtrAvidin-Alkaline Phosphotase (1:5,000 dilution) to each well and incubated at 37° C. for 30 min. Wells are washed ×3 with PBS(+Ca,Mg)+0.5% BSA. 1 tablet of p-Nitrophenol Phosphate pNPP is dissolved in 5 ml of glycine buffer (pH 10.4). 100 μl of pNPP substrate in glycine buffer is added to each test well. Standard wells in triplicate are prepared from the working dilution of the ExtrAvidin-Alkaline Phosphotase in glycine buffer: 1:5,000 (10⁰)>10^{-0.5}>10⁻¹>10^{-1.5}. 5 μl of each dilution is added to triplicate wells and the resulting AP content in each well is 5.50 ng, 1.74 ng, 0.55 ng, 0.18 ng. 100 μl of pNNP reagent must then be added to each of the standard wells. The plate must be incubated at 37° C. for 4 h. A volume of 50 μl of 3M NaOH is added to all wells. The results are quantified on a plate reader at 405 nm. The background subtraction option is used on blank wells filled with glycine buffer only. The template is set up to indicate the concentration of AP-conjugate in each standard well [5.50 ng; 1.74 ng; 0.55 ng; 0.18 ng]. Results are indicated as amount of bound AP-conjugate in each sample.

[0971] The studies described in this example tested activity of agonists or antagonists of the invention. However, one skilled in the art could easily modify the exemplified studies to test the activity of polynucleotides or polypeptides of the invention (e.g., gene therapy).

### Example 25

### Production of Polypeptide of the Invention for High-Throughput Screening Assays

[0972] The following protocol produces a supernatant containing polypeptide of the present invention to be tested. This supernatant can then be used in the Screening Assays described in Examples 27-34.

[0973] First, dilute Poly-D-Lysine (644 587 Boehringer-Mannheim) stock solution (1 mg/ml in PBS) 1:20 in PBS (w/o calcium or magnesium 17-516F Biowhittaker) for a working solution of 50 ug/ml. Add 200 ul of this solution to each well (24 well plates) and incubate at RT for 20 minutes. Be sure to distribute the solution over each well (note: a 12-channel pipetter may be used with tips on every other channel). Aspirate off the Poly-D-Lysine solution and rinse with 1 ml PBS (Phosphate Buffered Saline). The PBS should remain in the well until just prior to plating the cells and plates may be poly-lysine coated in advance for up to two weeks.

[0974] Plate 293T cells (do not carry cells past P+20) at 2×10⁵ cells/well in 0.5 ml DMEM (Dulbecco's Modified Eagle Medium)(with 4.5 G/L glucose and L-glutamine(12-604F Biowhittaker))/10% heat inactivated FBS(14-503F Biowhittaker)/1× Penstrep(17-602E Biowhittaker). Let the cells grow overnight.

[0975] The next day, mix together in a sterile solution basin: 300 ul Lipofectamine (18324-012 Gibco/BRL) and 5 ml Optimem 1 (31985070 Gibco/BRL)/96-well plate. With a small volume multi-channel pipetter, aliquot approximately 2 ug of an expression vector containing a polynucleotide insert, produced by the methods described in Examples 8-10, into an appropriately labeled 96-well round bottom plate. With a multi-channel pipetter, add 50 ul of the Lipofectamine/Optimem I mixture to each well. Pipette up and down gently to mix. Incubate at RT 15-45 minutes. After about 20 minutes, use a multi-channel pipetter to add 150 ul Optimem I to each well. As a control, one plate of vector DNA lacking an insert should be transfected with each set of transfections.

[0976] Preferably, the transfection should be performed by tag-teaming the following tasks. By tag-teaming, hands on time is cut in half, and the cells do not spend too much time on PBS. First, person A aspirates off the media from four 24-well plates of cells, and then person B rinses each well with 0.5-1 ml PBS. Person A then aspirates off PBS rinse, and person B, using a 12-channel pipetter with tips on every other channel, adds the 200 ul of DNA/Lipofectamine/Optimem I complex to the odd wells first, then to the even wells, to each row on the 24-well plates. Incubate at 37 degree C. for 6 hours.

[0977] While cells are incubating, prepare appropriate media, either 1% BSA in DMEM with 1× penstrep, or HGS CHO-5 media (116.6 mg/L of CaCl2 (anhyd); 0.00130 mg/L CuSO₄-5H₂O; 0.050 mg/L of Fe(NO₃)₃-9H₂O; 0.417 mg/L of FeSO₄-7H₂O; 311.80 mg/L of Kcl; 28.64 mg/L of MgCl₂; 48.84 mg/L of MgSO₄; 6995.50 mg/L of NaCl; 2400.0 mg/L of NaHCO₃; 62.50 mg/L of NaH₂PO₄—H₂O; 71.02 mg/L of Na₂HPO4; 0.4320 mg/L of ZnSO₄-7H20; 0.002 mg/L of Arachidonic Acid; 1.022 mg/L of Cholesterol; 0.070 mg/L of DL-alpha-Tocopherol-Acetate; 0.0520 mg/L of Linoleic Acid; 0.010 mg/L of Linolenic Acid; 0.010 mg/L of Myristic Acid; 0.010 mg/L of Oleic Acid; 0.010 mg/L of Palmitric Acid; 0.010 mg/L of Palmitic Acid; 100 mg/L of Pluronic F-68; 0.010 mg/L of Stearic Acid; 2.20 mg/L of Tween 80; 4551 mg/L of D-Glucose; 130.85 mg/ml of L-Alanine; 147.50 mg/ml of L-Arginine-HCL; 7.50 mg/ml of L-Asparagine-H₂0; 6.65 mg/ml of L-Aspartic Acid; 29.56 mg/ml of L-Cystine-2HCL-H₂0; 31.29 mg/ml of L-Cystine-2HCL; 7.35 mg/ml of L-Glutamic Acid; 365.0 mg/ml of L-Glutamine; 18.75 mg/ml of Glycine; 52.48 mg/ml of L-Histidine-HCL-H₂0; 106.97 mg/ml of L-Isoleucine; 111.45 mg/ml of L-Leucine; 163.75 mg/ml of L-Lysine HCL; 32.34 mg/ml of L-Methionine; 68.48 mg/ml of L-Phenylalainine; 40.0 mg/ml of L-Proline; 26.25 mg/ml of L-Serine; 101.05 mg/ml of L-Threonine; 19.22 mg/ml of L-Tryptophan; 91.79 mg/ml of L-Tryrosine-2Na-2H₂0; and 99.65 mg/ml of L-Valine; 0.0035 mg/L of Biotin; 3.24 mg/L of D-Ca Pantothenate; 11.78 mg/L of Choline Chloride; 4.65 mg/L of Folic Acid; 15.60 mg/L of i-lnositol; 3.02 mg/L of Niacinamide; 3.00 mg/L of Pyridoxal HCL; 0.031 mg/L of Pyridoxine HCL; 0.319 mg/L of Riboflavin; 3.17 mg/L of Thiamine HCL; 0.365 mg/L of Thymidine; 0.680 mg/L of Vitamin B₁₂; 25 mM of HEPES Buffer; 2.39 mg/L of Na Hypoxanthine; 0.105 mg/L of Lipoic Acid; 0.081 mg/L of Sodium Putrescine-2HCL; 55.0 mg/L of Sodium Pyruvate; 0.0067 mg/L of Sodium Selenite; 20 uM of Ethanolamine; 0.122 mg/L of Ferric Citrate; 41.70 mg/L of Methyl-B-Cyclodextrin complexed with Linoleic Acid; 33.33 mg/L of Methyl-B-Cyclodextrin complexed with Oleic Acid; 10 mg/L of Methyl-B-Cyclodextrin complexed with Retinal Acetate. Adjust osmolarity to 327 mOsm) with 2 mm glutamine and 1× penstrep. (BSA (81-068-3 Bayer) 100 gm dissolved in 1 L DMEM for a 10% BSA stock solution). Filter the media and collect 50 ul for endotoxin assay in 15 ml polystyrene conical.

[0978] The transfection reaction is terminated, preferably by tag-teaming, at the end of the incubation period. Person A aspirates off the transfection media, while person B adds 1.5 ml appropriate media to each well. Incubate at 37 degree C. for 45 or 72 hours depending on the media used: 1% BSA for 45 hours or CHO-5 for 72 hours.

[0979] On day four, using a 300 ul multichannel pipetter, aliquot 600 ul in one 1 ml deep well plate and the remaining supernatant into a 2 ml deep well. The supernatants from each well can then be used in the assays described in Examples 27-33.

[0980] It is specifically understood that when activity is obtained in any of the assays described below using a supernatant, the activity originates from either the polypeptide of the present invention directly (e.g., as a secreted protein) or by polypeptide of the present invention inducing expression of other proteins, which are then secreted into the supernatant. Thus, the invention further provides a method of identifying the protein in the supernatant characterized by an activity in a particular assay.

### Example 26

### Construction of GAS Reporter Construct

[0981] One signal transduction pathway involved in the differentiation and proliferation of cells is called the Jaks-STATs pathway. Activated proteins in the Jaks-STATs pathway bind to gamma activation site “GAS” elements or interferon-sensitive responsive element (“ISRE”), located in the promoter of many genes. The binding of a protein to these elements alter the expression of the associated gene.

[0982] GAS and ISRE elements are recognized by a class of transcription factors called Signal Transducers and Activators of Transcription, or “STATs.” There are six members of the STATs family. Stat1 and Stat3 are present in many cell types, as is Stat2 (as response to IFN-alpha is widespread). Stat4 is more restricted and is not in many cell types though it has been found in T helper class I, cells after treatment with IL-12. Stat5 was originally called mammary growth factor, but has been found at higher concentrations in other cells including myeloid cells. It can be activated in tissue culture cells by many cytokines.

[0983] The STATs are activated to translocate from the cytoplasm to the nucleus upon tyrosine phosphorylation by a set of kinases known as the Janus Kinase (“Jaks”) family. Jaks represent a distinct family of soluble tyrosine kinases and include Tyk2, Jak1, Jak2, and Jak3. These kinases display significant sequence similarity and are generally catalytically inactive in resting cells.

[0984] The Jaks are activated by a wide range of receptors summarized in the Table below. (Adapted from review by Schidler and Damell, Ann. Rev. Biochem. 64:621-51 (1995)). A cytokine receptor family, capable of activating Jaks, is divided into two groups: (a) Class 1 includes receptors for IL-2, IL-3, IL-4, IL-6, IL-7, IL-9, IL-11, IL-12, IL-15, Epo, PRL, GH, G-CSF, GM-CSF, LIF, CNTF, and thrombopoietin; and (b) Class 2 includes IFN-a, IFN-g, and IL-10. The Class 1 receptors share a conserved cysteine motif (a set of four conserved cysteines and one tryptophan) and a WSXWS motif (a membrane proximal region encoding Trp-Ser-Xaa-Trp-Ser (SEQ ID NO: 2)).

[0985] Thus, on binding of a ligand to a receptor, Jaks are activated, which in turn activate STATs, which then translocate and bind to GAS elements. This entire process is encompassed in the Jaks-STATs signal transduction pathway. Therefore, activation of the Jaks-STATs pathway, reflected by the binding of the GAS or the ISRE element, can be used to indicate proteins involved in the proliferation and differentiation of cells. For example, growth factors and cytokines are known to activate the Jaks-STATs pathway (See Table below). Thus, by using GAS elements linked to reporter molecules, activators of the Jaks-STATs pathway can be identified.

| | JAKs | | | | | |
|---|---|---|---|---|---|---|
| Ligand | tyk2 | Jak1 | Jak2 | Jak3 | STATS | GAS (elements) or ISRE |
| IFN family | | | | | | |
| IFN-a/B | + | + | − | − | 1, 2, 3 | ISRE |
| IFN-g | | + | + | − | 1 | GAS (IRF1 > Lys6 > IFP) |
| Il-10 | + | ? | ? | − | 1, 3 | |
| gp130 family | | | | | | |
| IL-6 (Pleiotropic) | + | + | + | ? | 1, 3 | GAS (IRF1 > Lys6 > IFP) |
| Il-11 (Pleiotropic) | ? | + | ? | ? | 1, 3 | |
| OnM (Pleiotropic) | ? | + | + | ? | 1, 3 | |
| LIF (Pleiotropic) | ? | + | + | ? | 1, 3 | |
| CNTF (Pleiotropic) | −/+ | + | + | ? | 1, 3 | |
| G-CSF (Pleiotropic) | ? | + | ? | ? | 1, 3 | |
| IL-12 (Pleiotropic) | + | − | + | + | 1, 3 | |
| g-C family | | | | | | |
| IL-2 (lymphocytes) | − | + | − | + | 1, 3, 5 | GAS |
| IL-4 (lymph/myeloid) | − | + | − | + | 6 | GAS (IRF1 = IFP >> Ly6)(IgH) |
| IL-7 (lymphocytes) | − | + | − | + | 5 | GAS |
| IL-9 (lymphocytes) | − | + | − | + | 5 | GAS |
| IL-13 (lymphocyte) | − | + | ? | ? | 6 | GAS |
| IL-15 | ? | + | ? | + | 5 | GAS |
| gp140 family | | | | | | |
| IL-3 (myeloid) | − | − | + | − | 5 | GAS (IRF1 > IFP >> Ly6) |
| IL-5 (myeloid) | − | − | + | − | 5 | GAS |
| GM-CSF (myeloid) | − | − | + | − | 5 | GAS |
| Growth hormone family | | | | | | |
| GH | ? | − | + | − | 5 | |
| PRL | ? | +/− | + | − | 1, 3, 5 | |
| EPO | ? | − | + | − | 5 | GAS (B-CAS > IRF1 = IFP >> Ly6) |
| Receptor Tyrosine Kinases | | | | | | |
| EGF | ? | + | + | − | 1, 3 | GAS (IRF1) |
| PDGF | ? | + | + | − | 1, 3 | |
| CSF-1 | ? | + | + | − | 1, 3 | GAS (not IRF1) |

[0986] To construct a synthetic GAS containing promoter element, which is used in the Biological Assays described in Examples 27-28, a PCR based strategy is employed to generate a GAS-SV40 promoter sequence. The 5′ primer contains four tandem copies of the GAS binding site found in the IRF1 promoter and previously demonstrated to bind STATs upon induction with a range of cytokines (Rothman et al., Immunity 1:457-468 (1994)), although other GAS or ISRE elements can be used instead. The 5′ primer also contains 18 bp of sequence complementary to the SV40 early promoter sequence and is flanked with an XhoI site. The sequence of the 5′ primer is:

| | |
|---|---|
| 5′:GCGCCTCGAGATTTCCCCGAAATCTAGATTTCCC | (SEQ ID NO:3) |
| CGAAATGATTTCCCCGAAATGATTTCCCCGAAATATC | |
| TGCCATCTCAATTAG:3′ | |

[0987] The downstream primer is complementary to the SV40 promoter and is flanked with a Hind III site:

| | |
|---|---|
| 5′:GCGGCAAGCTTTTTGCAAAGCCTAGGC:3′ | (SEQ ID NO:4) |

[0988] PCR amplification is performed using the SV40 promoter template present in the B-gal:promoter plasmid obtained from Clontech. The resulting PCR fragment is digested with XhoI/Hind III and subcloned into BLSK2−. (Stratagene.) Sequencing with forward and reverse primers confirms that the insert contains the following sequence:

| | |
|---|---|
| 5′:CTCGAGATTTCCCCGAAATCTAGATTTCC | (SEQ ID NO:5) |
| CCGAAATGATTTCCCCGAAATGATTTCCCCGAAATAT | |
| CTGCCATCTCAATTAGTCAGCAACCATAGTCCCGCCC | |
| CTAACTCCGCCCATCCCGCCCCTAACTCCGCCCAGTT | |
| CCGCCCATTCTCCGCCCCATGGCTGACTAATTTTTTT | |
| TATTTATGCAGAGGCCGAGGCCGCCTCGGCCTCTGAG | |
| CTATTCCAGAAGTAGTGAGGAGGCTTTTTTGGAGGCC | |
| TAGGCTTTTGCAAAAAGCTT:3′ | |

[0989] With this GAS promoter element linked to the SV40 promoter, a GAS:SEAP2 reporter construct is next engineered. Here, the reporter molecule is a secreted alkaline phosphatase, or “SEAP.” Clearly, however, any reporter molecule can be instead of SEAP, in this or in any of the other Examples. Well known reporter molecules that can be used instead of SEAP include chloramphenicol acetyltransferase (CAT), luciferase, alkaline phosphatase, B-galactosidase, green fluorescent protein (GFP), or any protein detectable by an antibody.

[0990] The above sequence confirmed synthetic GAS-SV40 promoter element is subcloned into the pSEAP-Promoter vector obtained from Clontech using HindIII and XhoI, effectively replacing the SV40 promoter with the amplified GAS:SV40 promoter element, to create the GAS-SEAP vector. However, this vector does not contain a neomycin resistance gene, and therefore, is not preferred for mammalian expression systems.

[0991] Thus, in order to generate mammalian stable cell lines expressing the GAS-SEAP reporter, the GAS-SEAP cassette is removed from the GAS-SEAP vector using SalI and NotI, and inserted into a backbone vector containing the neomycin resistance gene, such as pGFP-1 (Clontech), using these restriction sites in the multiple cloning site, to create the GAS-SEAP/Neo vector. Once this vector is transfected into mammalian cells, this vector can then be used as a reporter molecule for GAS binding as described in Examples 27-28.

[0992] Other constructs can be made using the above description and replacing GAS with a different promoter sequence. For example, construction of reporter molecules containing EGR and NF-KB promoter sequences are described in Example 29. However, many other promoters can be substituted using the protocols described in this Example. For instance, SRE, IL-2, NFAT, or Osteocalcin promoters can be substituted, alone or in combination (e.g., GAS/NF-KB/EGR, GAS/NF-KB, Il-2/NFAT, or NF-KB/GAS). Similarly, other cell lines can be used to test reporter construct activity, such as HELA (epithelial), HUVEC (endothelial), Reh (B-cell), Saos-2 (osteoblast), HUVAC (aortic), or Cardiomyocyte.

### Example 27

### High-Throughput Screening Assay for T-Cell Activity

[0993] The following protocol is used to assess T-cell activity by identifying factors, and determining whether supernate containing a polypeptide of the invention proliferates and/or differentiates T-cells. T-cell activity is assessed using the GAS/SEAP/Neo construct produced in Example 26. Thus, factors that increase SEAP activity indicate the ability to activate the Jaks-STATS signal transduction pathway. The T-cell used in this assay is Jurkat T-cells (ATCC Accession No. TIB-152), although Molt-3 cells (ATCC Accession No. CRL-1552) and Molt-4 cells (ATCC Accession No. CRL-1582) cells can also be used.

[0994] Jurkat T-cells are lymphoblastic CD4+Th1 helper cells. In order to generate stable cell lines, approximately 2 million Jurkat cells are transfected with the GAS-SEAP/neo vector using DMRIE-C (Life Technologies)(transfection procedure described below). The transfected cells are seeded to a density of approximately 20,000 cells per well and transfectants resistant to 1 mg/ml genticin selected. Resistant colonies are expanded and then tested for their response to increasing concentrations of interferon gamma. The dose response of a selected clone is demonstrated.

[0995] Specifically, the following protocol will yield sufficient cells for 75 wells containing 200 ul of cells. Thus, it is either scaled up, or performed in multiple to generate sufficient cells for multiple 96 well plates. Jurkat cells are maintained in RPMI+10% serum with 1% Pen-Strep. Combine 2.5 mls of OPTI-MEM (Life Technologies) with 10 ug of plasmid DNA in a T25 flask. Add 2.5 ml OPTI-MEM containing 50 ul of DMRIE-C and incubate at room temperature for 15-45 mins.

[0996] During the incubation period, count cell concentration, spin down the required number of cells (10⁷ per transfection), and resuspend in OPTI-MEM to a final concentration of 10⁷ cells/ml. Then add 1 ml of 1×10⁷ cells in OPTI-MEM to T25 flask and incubate at 37 degree C. for 6 hrs. After the incubation, add 10 ml of RPMI+15% serum.

[0997] The Jurkat: GAS-SEAP stable reporter lines are maintained in RPMI+10% serum, 1 mg/ml Genticin, and 1% Pen-Strep. These cells are treated with supernatants containing polypeptide of the present invention or polypeptide of the present invention induced polypeptides as produced by the protocol described in Example 25.

[0998] On the day of treatment with the supernatant, the cells should be washed and resuspended in fresh RPMI+10% serum to a density of 500,000 cells per ml. The exact number of cells required will depend on the number of supernatants being screened. For one 96 well plate, approximately 10 million cells (for 10 plates, 100 million cells) are required.

[0999] Transfer the cells to a triangular reservoir boat, in order to dispense the cells into a 96 well dish, using a 12 channel pipette. Using a 12 channel pipette, transfer 200 ul of cells into each well (therefore adding 100,000 cells per well).

[1000] After all the plates have been seeded, 50 ul of the supernatants are transferred directly from the 96 well plate containing the supernatants into each well using a 12 channel pipette. In addition, a dose of exogenous interferon gamma (0.1, 1.0, 10 ng) is added to wells H9, H10, and H11 to serve as additional positive controls for the assay.

[1001] The 96 well dishes containing Jurkat cells treated with supernatants are placed in an incubator for 48 hrs (note: this time is variable between 48-72 hrs). 35 ul samples from each well are then transferred to an opaque 96 well plate using a 12 channel pipette. The opaque plates should be covered (using sellophene covers) and stored at −20 degree C. until SEAP assays are performed according to Example 30. The plates containing the remaining treated cells are placed at 4 degree C. and serve as a source of material for repeating the assay on a specific well if desired.

[1002] As a positive control, 100 Unit/ml interferon gamma can be used which is known to activate Jurkat T cells. Over 30 fold induction is typically observed in the positive control wells.

[1003] The above protocol may be used in the generation of both transient, as well as, stable transfected cells, which would be apparent to those of skill in the art.

### Example 28

### High-Throughput Screening Assay Identifying Myeloid Activity

[1004] The following protocol is used to assess myeloid activity of polypeptide of the present invention by determining whether polypeptide of the present invention proliferates and/or differentiates myeloid cells. Myeloid cell activity is assessed using the GAS/SEAP/Neo construct produced in Example 26. Thus, factors that increase SEAP activity indicate the ability to activate the Jaks-STATS signal transduction pathway. The myeloid cell used in this assay is U937, a pre-monocyte cell line, although TF-1, HL60, or KG1 can be used.

[1005] To transiently transfect U937 cells with the GAS/SEAP/Neo construct produced in Example 26, a DEAE-Dextran method (Kharbanda et. al., 1994, Cell Growth & Differentiation, 5:259-265) is used. First, harvest 2×10⁷ U937 cells and wash with PBS. The U937 cells are usually grown in RPMI 1640 medium containing 10% heat-inactivated fetal bovine serum (FBS) supplemented with 100 units/ml penicillin and 100 mg/ml streptomycin.

[1006] Next, suspend the cells in 1 ml of 20 mM Tris-HCl (pH 7.4) buffer containing 0.5 mg/ml DEAE-Dextran, 8 ug GAS-SEAP2 plasmid DNA, 140 mM NaCl, 5 mM KCl, 375 uM Na₂HPO₄.7H₂O, 1 mM MgCl₂, and 675 uM CaC₁₂. Incubate at 37 degrees C. for 45 min.

[1007] Wash the cells with RPMI 1640 medium containing 10% FBS and then resuspend in 10 ml complete medium and incubate at 37 degree C. for 36 hr.

[1008] The GAS-SEAP/U937 stable cells are obtained by growing the cells in 400 ug/ml G418. The G418-free medium is used for routine growth but every one to two months, the cells should be re-grown in 400 ug/ml G418 for couple of passages.

[1009] These cells are tested by harvesting 1×10⁸ cells (this is enough for ten 96-well plates assay) and wash with PBS. Suspend the cells in 200 ml above described growth medium, with a final density of 5×10⁵ cells/ml. Plate 200 ul cells per well in the 96-well plate (or 1×10⁵ cells/well).

[1010] Add 50 ul of the supernatant prepared by the protocol described in Example 25. Incubate at 37 degee C for 48 to 72 hr. As a positive control, 100 Unit/ml interferon gamma can be used which is known to activate U937 cells. Over 30 fold induction is typically observed in the positive control wells. SEAP assay the supernatant according to the protocol described in Example 30.

### Example 29

### High-Throughput Screening Assay for T-Cell Activity

[1011] NF-KB (Nuclear Factor KB) is a transcription factor activated by a wide variety of agents including the inflammatory cytokines IL-1 and TNF, CD30 and CD40, lymphotoxin-alpha and lymphotoxin-beta, by exposure to LPS or thrombin, and by expression of certain viral gene products. As a transcription factor, NF-KB regulates the expression of genes involved in immune cell activation, control of apoptosis (NF-KB appears to shield cells from apoptosis), B and T-cell development, anti-viral and antimicrobial responses, and multiple stress responses.

[1012] In non-stimulated conditions, NF-KB is retained in the cytoplasm with I-KB (Inhibitor KB). However, upon stimulation, I-KB is phosphorylated and degraded, causing NF-KB to shuttle to the nucleus, thereby activating transcription of target genes. Target genes activated by NF-KB include IL-2, IL-6, GM-CSF, ICAM-1 and class 1 MHC.

[1013] Due to its central role and ability to respond to a range of stimuli, reporter constructs utilizing the NF-KB promoter element are used to screen the supernatants produced in Example 25. Activators or inhibitors of NF-KB would be useful in detecting, preventing, diagnosing, prognosticating, treating, and/or ameliorating diseases. For example, inhibitors of NF-KB could be used to treat those diseases related to the acute or chronic activation of NF-KB, such as rheumatoid arthritis.

[1014] To construct a vector containing the NF-KB promoter element, a PCR based strategy is employed. The upstream primer contains four tandem copies of the NF-KB binding site (GGGGACTTTCCC) (SEQ ID NO: 8), 18 bp of sequence complementary to the 5′ end of the SV40 early promoter sequence, and is flanked with an XhoI site:

| | |
|---|---|
| 5′:GCGGCCTCGAGGGGACTTTCCCGGGGACT | (SEQ ID NO:9) |
| TTCCGGGGACTTTCCGGGACTTTCCATCCTGCCATCT | |
| CAATTAG:3′ | |

[1015] The downstream primer is complementary to the 3′ end of the SV40 promoter and is flanked with a Hind III site:

| | |
|---|---|
| 5′:GCGGCAAGCTTTTTGCAAAGCCTAGGC:3′ | (SEQ ID NO:4) |

[1016] PCR amplification is performed using the SV40 promoter template present in the pB-gal:promoter plasmid obtained from Clontech. The resulting PCR fragment is digested with XhoI and Hind III and subcloned into BLSK2−. (Stratagene) Sequencing with the T7 and T3 primers confirms the insert contains the following sequence:

(SEQ ID NO:10)

5′:CTCGAGGGGACTTTCCCGGGGACTTTCCG
GGGACTTTCCGGGACTTTCCATGTGCCATCTCAATTA
GTCAGCAACCATAGTCGCGCCCCTAACTCCGCCCATC
CCGCCCCTAACTCCGCCCAGTTCCGCCCATTCTCCGC
CCCATGGCTGACTAATTTTTTTTATTTATGCAGAGGC
CGAGGCCGCCTCGGCCTCTGAGCTATTCCAGAAGTAG
TGAGGAGGCTTTTTTGGAGGCCTAGGCTTTTGCAAAA
AGCTT:3′

[1017] Next, replace the SV40 minimal promoter element present in the pSEAP2-promoter plasmid (Clontech) with this NF-KB/SV40 fragment using XhoI and HindIII. However, this vector does not contain a neomycin resistance gene, and therefore, is not preferred for mammalian expression systems.

[1018] In order to generate stable mammalian cell lines, the NF-KB/SV40/SEAP cassette is removed from the above NF-KB/SEAP vector using restriction enzymes SalI and NotI, and inserted into a vector containing neomycin resistance. Particularly, the NF-KB/SV40/SEAP cassette was inserted into pGFP-1 (Clontech), replacing the GFP gene, after restricting pGFP-1 with SalI and NotI.

[1019] Once NF-KB/SV40/SEAP/Neo vector is created, stable Jurkat T-cells are created and maintained according to the protocol described in Example 27. Similarly, the method for assaying supernatants with these stable Jurkat T-cells is also described in Example 27. As a positive control, exogenous TNF alpha (0.1, 1, 10 ng) is added to wells H9, H10, and H11, with a 5-10 fold activation typically observed. CL Example 30

### Assay for SEAP Activity

[1020] As a reporter molecule for the assays described in Examples 27-29, SEAP activity is assayed using the Tropix Phospho-light Kit (Cat. BP-400) according to the following general procedure. The Tropix Phospho-light Kit supplies the Dilution, Assay, and Reaction Buffers used below.

[1021] Prime a dispenser with the 2.5× Dilution Buffer and dispense 15 ul of 2.5× dilution buffer into Optiplates containing 35 ul of a supernatant. Seal the plates with a plastic sealer and incubate at 65 degree C. for 30 min. Separate the Optiplates to avoid uneven heating.

[1022] Cool the samples to room temperature for 15 minutes. Empty the dispenser and prime with the Assay Buffer. Add 50 ml Assay Buffer and incubate at room temperature 5 min. Empty the dispenser and prime with the Reaction Buffer (see the Table below). Add 50 ul Reaction Buffer and incubate at room temperature for 20 minutes. Since the intensity of the chemiluminescent signal is time dependent, and it takes about 10 minutes to read 5 plates on a luminometer, thus one should treat 5 plates at each time and start the second set 10 minutes later.

[1023] Read the relative light unit in the luminometer. Set H12 as blank, and print the results. An increase in chemiluminescence indicates reporter activity.

Reaction Buffer Formulation:

| # of plates | Rxn buffer diluent (ml) | CSPD (ml) |
|---|---|---|
| 10 | 60 | 3 |
| 11 | 65 | 3.25 |
| 12 | 70 | 3.5 |
| 13 | 75 | 3.75 |
| 14 | 80 | 4 |
| 15 | 85 | 4.25 |
| 16 | 90 | 4.5 |
| 17 | 95 | 4.75 |
| 18 | 100 | 5 |
| 19 | 105 | 5.25 |
| 20 | 110 | 5.5 |
| 21 | 115 | 5.75 |
| 22 | 120 | 6 |
| 23 | 125 | 6.25 |
| 24 | 130 | 6.5 |
| 25 | 135 | 6.75 |
| 26 | 140 | 7 |
| 27 | 145 | 7.25 |
| 28 | 150 | 7.5 |
| 29 | 155 | 7.75 |
| 30 | 160 | 8 |
| 31 | 165 | 8.25 |
| 32 | 170 | 8.5 |
| 33 | 175 | 8.75 |
| 34 | 180 | 9 |
| 35 | 185 | 9.25 |
| 36 | 190 | 9.5 |
| 37 | 195 | 9.75 |
| 38 | 200 | 10 |
| 39 | 205 | 10.25 |
| 40 | 210 | 10.5 |
| 41 | 215 | 10.75 |
| 42 | 220 | 11 |
| 43 | 225 | 11.25 |
| 44 | 230 | 11.5 |
| 45 | 235 | 11.75 |
| 46 | 240 | 12 |
| 47 | 245 | 12.25 |
| 48 | 250 | 12.5 |
| 49 | 255 | 12.75 |
| 50 | 260 | 13 |

### Example 31

### High-Throughput Screening Assay Identifying Changes in Small Molecule Concentration and Membrane Permeability

[1024] Binding of a ligand to a receptor is known to alter intracellular levels of small molecules, such as calcium, potassium, sodium, and pH, as well as alter membrane potential. These alterations can be measured in an assay to identify supernatants which bind to receptors of a particular cell. Although the following protocol describes an assay for calcium, this protocol can easily be modified to detect changes in potassium, sodium, pH, membrane potential, or any other small molecule which is detectable by a fluorescent probe.

[1025] The following assay uses Fluorometric Imaging Plate Reader (“FLIPR”) to measure changes in fluorescent molecules (Molecular Probes) that bind small molecules. Clearly, any fluorescent molecule detecting a small molecule can be used instead of the calcium fluorescent molecule, fluo-4 (Molecular Probes, Inc.; catalog no. F-14202), used here.

[1026] For adherent cells, seed the cells at 10,000 cells/well in a Co-star black 96-well plate with clear bottom. The plate is incubated in a CO₂ incubator for 20 hours. The adherent cells are washed two times in Biotek washer with 200 ul of HBSS (Hank's Balanced Salt Solution) leaving 100 ul of buffer after the final wash.

[1027] A stock solution of 1 mg/ml fluo-4 is made in 10% pluronic acid DMSO. To load the cells with fluo-4, 50 ul of 12 ug/ml fluo-4 is added to each well. The plate is incubated at 37 degrees C. in a CO₂ incubator for 60 min. The plate is washed four times in the Biotek washer with HBSS leaving 100 ul of buffer.

[1028] For non-adherent cells, the cells are spun down from culture media. Cells are re-suspended to 2-5×10⁶ cells/ml with HBSS in a 50-ml conical tube. 4 ul of 1 mg/ml fluo-4 solution in 10% pluronic acid DMSO is added to each ml of cell suspension. The tube is then placed in a 37 degrees C. water bath for 30-60 min. The cells are washed twice with HBSS, resuspended to 1×10⁶ cells/ml, and dispensed into a microplate, 100 ul/well. The plate is centrifuged at 1000 rpm for 5 min. The plate is then washed once in Denley Cell Wash with 200 ul, followed by an aspiration step to 100 ul final volume.

[1029] For a non-cell based assay, each well contains a fluorescent molecule, such as fluo-4. The supernatant is added to the well, and a change in fluorescence is detected.

[1030] To measure the fluorescence of intracellular calcium, the FLIPR is set for the following parameters: (1) System gain is 300-800 mW; (2) Exposure time is 0.4 second; (3) Camera F/stop is F/2; (4) Excitation is 488 nm; (5) Emission is 530 nm; and (6) Sample addition is 50 ul. Increased emission at 530 nm indicates an extracellular signaling event caused by the a molecule, either polypeptide of the present invention or a molecule induced by polypeptide of the present invention, which has resulted in an increase in the intracellular Ca++concentration.

### Example 32

### High-Throughput Screening Assay Identifying Tyrosine Kinase Activity

[1031] The Protein Tyrosine Kinases (PTK) represent a diverse group of transmembrane and cytoplasmic kinases. Within the Receptor Protein Tyrosine Kinase RPTK) group are receptors for a range of mitogenic and metabolic growth factors including the PDGF, FGF, EGF, NGF, HGF and Insulin receptor subfarnilies. In addition there are a large family of RPTKs for which the corresponding ligand is unknown. Ligands for RPTKs include mainly secreted small proteins, but also membrane-bound and extracellular matrix proteins.

[1032] Activation of RPTK by ligands involves ligand-mediated receptor dimerization, resulting in transphosphorylation of the receptor subunits and activation of the cytoplasmic tyrosine kinases. The cytoplasmic tyrosine kinases include receptor associated tyrosine kinases of the src-family (e.g., src, yes, lck, lyn, fyn) and non-receptor linked and cytosolic protein tyrosine kinases, such as the Jak family, members of which mediate signal transduction triggered by the cytokine superfamily of receptors (e.g., the Interleukins, Interferons, GM-CSF, and Leptin).

[1033] Because of the wide range of known factors capable of stimulating tyrosine kinase activity, identifying whether polypeptide of the present invention or a molecule induced by polypeptide of the present invention is capable of activating tyrosine kinase signal transduction pathways is of interest. Therefore, the following protocol is designed to identify such molecules capable of activating the tyrosine kinase signal transduction pathways.

[1034] Seed target cells (e.g., primary keratinocytes) at a density of approximately 25,000 cells per well in a 96 well Loprodyne Silent Screen Plates purchased from Nalge Nunc (Naperville, Ill.). The plates are sterilized with two 30 minute rinses with 100% ethanol, rinsed with water and dried overnight. Some plates are coated for 2 hr with 100 ml of cell culture grade type I collagen (50 mg/ml), gelatin (2%) or polylysine (50 mg/ml), all of which can be purchased from Sigma Chemicals (St. Louis, Mo.) or 10% Matrigel purchased from Becton Dickinson (Bedford, Mass.), or calf serum, rinsed with PBS and stored at 4 degree C. Cell growth on these plates is assayed by seeding 5,000 cells/well in growth medium and indirect quantitation of cell number through use of alamarBlue as described by the manufacturer Alamar Biosciences, Inc. (Sacramento, Calif.) after 48 hr. Falcon plate covers #3071 from Becton Dickinson (Bedford, Mass.) are used to cover the Loprodyne Silent Screen Plates. Falcon Microtest III cell culture plates can also be used in some proliferation experiments.

[1035] To prepare extracts, A431 cells are seeded onto the nylon membranes of Loprodyne plates (20,000/200 ml/well) and cultured overnight in complete medium. Cells are quiesced by incubation in serum-free basal medium for 24 hr. After 5-20 minutes treatment with EGF (60 ng/ml) or 50 ul of the supernatant produced in Example 25, the medium was removed and 100 ml of extraction buffer ((20 mM HEPES pH 7.5, 0.15 M NaCl, 1% Triton X-100, 0.1% SDS, 2 mM Na3VO4, 2 mM Na4P2O7 and a cocktail of protease inhibitors (# 1836170) obtained from Boeheringer Mannheim (Indianapolis, Ind.)) is added to each well and the plate is shaken on a rotating shaker for 5 minutes at 4° C. The plate is then placed in a vacuum transfer manifold and the extract filtered through the 0.45 mm membrane bottoms of each well using house vacuum. Extracts are collected in a 96-well catch/assay plate in the bottom of the vacuum manifold and immediately placed on ice. To obtain extracts clarified by centrifugation, the content of each well, after detergent solubilization for 5 minutes, is removed and centrifuged for 15 minutes at 4 degree Cat 16,000×g.

[1036] Test the filtered extracts for levels of tyrosine kinase activity. Although many methods of detecting tyrosine kinase activity are known, one method is described here.

[1037] Generally, the tyrosine kinase activity of a supernatant is evaluated by determining its ability to phosphorylate a tyrosine residue on a specific substrate (a biotinylated peptide). Biotinylated peptides that can be used for this purpose include PSK1 (corresponding to amino acids 6-20 of the cell division kinase cdc2-p34) and PSK2 (corresponding to amino acids 1-17 of gastrin). Both peptides are substrates for a range of tyrosine kinases and are available from Boehringer Mannheim.

[1038] The tyrosine kinase reaction is set up by adding the following components in order. First, add 10 ul of 5 uM Biotinylated Peptide, then 10 ul ATP/Mg₂₊ (5 mM ATP/50 mM MgCl₂), then 10 ul of 5× Assay Buffer (40 mM imidazole hydrochloride, pH7.3, 40 mM beta-glycerophosphate, 1 mM EGTA, 100 mM MgCl₂, 5 mM MnCl₂, 0.5 mg/ml BSA), then 5 ul of Sodium Vanadate (1 mM), and then 5 ul of water. Mix the components gently and preincubate the reaction mix at 30 degree C. for 2 min. Initial the reaction by adding 10 ul of the control enzyme or the filtered supernatant.

[1039] The tyrosine kinase assay reaction is then terminated by adding 10 ul of 120 mm EDTA and place the reactions on ice.

[1040] Tyrosine kinase activity is determined by transferring 50 ul aliquot of reaction mixture to a microtiter plate (MTP) module and incubating at 37 degree C. for 20 min. This allows the streptavidin coated 96 well plate to associate with the biotinylated peptide. Wash the MTP module with 300 ul/well of PBS four times. Next add 75 ul of anti-phospotyrosine antibody conjugated to horse radish peroxidase (anti-P-Tyr-POD(0.5u/ml)) to each well and incubate at 37 degree C. for one hour. Wash the well as above.

[1041] Next add 100 ul of peroxidase substrate solution (Boehringer Mannheim) and incubate at room temperature for at least 5 mins (up to 30 min). Measure the absorbance of the sample at 405 nm by using ELISA reader. The level of bound peroxidase activity is quantitated using an ELISA reader and reflects the level of tyrosine kinase activity.

### Example 33

### High-Throughput Screening Assay Identifying Phosphorylation Activity

[1042] As a potential alternative and/or complement to the assay of protein tyrosine kinase activity described in Example 32, an assay which detects activation (phosphorylation) of major intracellular signal transduction intermediates can also be used. For example, as described below one particular assay can detect tyrosine phosphorylation of the Erk-1 and Erk-2 kinases. However, phosphorylation of other molecules, such as Raf, JNK, p38 MAP, Map kinase kinase (MEK), MEK kinase, Src, Muscle specific kinase (MuSK), IRAK, Tec, and Janus, as well as any other phosphoserine, phosphotyrosine, or phosphothreonine molecule, can be detected by substituting these molecules for Erk-1 or Erk-2 in the following assay.

[1043] Specifically, assay plates are made by coating the wells of a 96-well ELISA plate with 0.1 ml of protein G (1 ug/ml) for 2 hr at room temp, (RT). The plates are then rinsed with PBS and blocked with 3% BSA/PBS for 1 hr at RT. The protein G plates are then treated with 2 commercial monoclonal antibodies (100 ng/well) against Erk-1 and Erk-2 (1 hr at RT) (Santa Cruz Biotechnology). (To detect other molecules, this step can easily be modified by substituting a monoclonal antibody detecting any of the above described molecules.) After 3-5 rinses with PBS, the plates are stored at 4 degree C. until use.

[1044] A431 cells are seeded at 20,000/well in a 96-well Loprodyne filterplate and cultured overnight in growth medium. The cells are then starved for 48 hr in basal medium (DMEM) and then treated with EGF (6 ng/well) or 50 ul of the supernatants obtained in Example 25 for 5-20 minutes. The cells are then solubilized and extracts filtered directly into the assay plate.

[1045] After incubation with the extract for 1 hr at RT, the wells are again rinsed. As a positive control, a commercial preparation of MAP kinase (10 ng/well) is used in place of A431 extract. Plates are then treated with a commercial polyclonal (rabbit) antibody (1 ug/ml) which specifically recognizes the phosphorylated epitope of the Erk-1 and Erk-2 kinases (1 hr at RT). This antibody is biotinylated by standard procedures. The bound polyclonal antibody is then quantitated by successive incubations with Europium-streptavidin and Europium fluorescence enhancing reagent in the Wallac DELFIA instrument (time-resolved fluorescence). An increased fluorescent signal over background indicates a phosphorylation by polypeptide of the present invention or a molecule induced by polypeptide of the present invention.

### Example 34

### Assay for the Stimulation of Bone Marrow CD34+ Cell Proliferation

[1046] This assay is based on the ability of human CD34+ to proliferate in the presence of hematopoietic growth factors and evaluates the ability of isolated polypeptides expressed in mammalian cells to stimulate proliferation of CD34+ cells.

[1047] It has been previously shown that most mature precursors will respond to only a single signal. More immature precursors require at least two signals to respond. Therefore, to test the effect of polypeptides on hematopoietic activity of a wide range of progenitor cells, the assay contains a given polypeptide in the presence or absence of other hematopoietic growth factors. Isolated cells are cultured for 5 days in the presence of Stem Cell Factor (SCF) in combination with tested sample. SCF alone has a very limited effect on the proliferation of bone marrow (BM) cells, acting in such conditions only as a “survival” factor. However, combined with any factor exhibiting stimulatory effect on these cells (e.g., IL-3), SCF will cause a synergistic effect. Therefore, if the tested polypeptide has a stimulatory effect on hematopoietic progenitors, such activity can be easily detected. Since normal BM cells have a low level of cycling cells, it is likely that any inhibitory effect of a given polypeptide, or agonists or antagonists thereof, might not be detected. Accordingly, assays for an inhibitory effect on progenitors is preferably tested in cells that are first subjected to in vitro stimulation with SCF+IL+3, and then contacted with the compound that is being evaluated for inhibition of such induced proliferation.

[1048] Briefly, CD34+ cells are isolated using methods known in the art. The cells are thawed and resuspended in medium (QBSF 60 serum-free medium with 1% L-glutamine (500 ml) Quality Biological, Inc., Gaithersburg, Md. Cat# 160-204-101). After several gentle centrifugation steps at 200×g, cells are allowed to rest for one hour. The cell count is adjusted to 2.5×10⁵ cells/ml. During this time, 100 μl of sterile water is added to the peripheral wells of a 96-well plate. The cytokines that can be tested with a given polypeptide in this assay is rhSCF (R&D Systems, Minneapolis, Minn., Cat# 255-SC) at 50 ng/ml alone and in combination with rhSCF and rhIL-3 (R&D Systems, Minneapolis, Minn., Cat# 203-ML) at 30 ng/ml. After one hour, 10 μl of prepared cytokines, 50 μl of the supernatants prepared in Example 25 (supernatants at 1:2 dilution=50 μl) and 20 μl of diluted cells are added to the media which is already present in the wells to allow for a final total volume of 100 μl. The plates are then placed in a 37° C./5% CO₂ incubator for five days.

[1049] Eighteen hours before the assay is harvested, 0.5 μCi/well of [3H] Thymidine is added in a 10 μl volume to each well to determine the proliferation rate. The experiment is terminated by harvesting the cells from each 96-well plate to a filtermat using the Tomtec Harvester 96. After harvesting, the filtermats are dried, trimmed and placed into OmniFilter assemblies consisting of one OmniFilter plate and one OmniFilter Tray. 60 μl Microscint is added to each well and the plate sealed with TopSeal-A press-on sealing film A bar code 15 sticker is affixed to the first plate for counting. The sealed plates are then loaded and the level of radioactivity determined via the Packard Top Count and the printed data collected for analysis. The level of radioactivity reflects the amount of cell proliferation.

[1050] The studies described in this example test the activity of a given polypeptide to stimulate bone marrow CD34+ cell proliferation. One skilled in the art could easily modify the exemplified studies to test the activity of polynucleotides (e.g., gene therapy), antibodies, agonists, and/or antagonists and fragments and variants thereof. As a nonlimiting example, potential antagonists tested in this assay would be expected to inhibit cell proliferation in the presence of cytokines and/or to increase the inhibition of cell proliferation in the presence of cytokines and a given polypeptide. In contrast, potential agonists tested in this assay would be expected to enhance cell proliferation and/or to decrease the inhibition of cell proliferation in the presence of cytokines and a given polypeptide.

[1051] The ability of a gene to stimulate the proliferation of bone marrow CD34+ cells indicates that polynucleotides and polypeptides corresponding to the gene are useful for the detection, prevention, diagnosis, prognostication, treatment, and/or amelioration of disorders affecting the immune system and hematopoiesis. Representative uses are described in the “Immune Activity” and “Infectious Disease” sections above, and elsewhere herein.

### Example 35

### Cellular Adhesion Molecule (CAM) Expression on Endothelial Cells

[1052] The recruitment of lymphocytes to areas of inflammation and angiogenesis involves specific receptor-ligand interactions between cell surface adhesion molecules (CAMs) on lymphocytes and the vascular endothelium. The adhesion process, in both normal and pathological settings, follows a multi-step cascade that involves intercellular adhesion molecule-1 (ICAM-1), vascular cell adhesion molecule-1 (VCAM-1), and endothelial leukocyte adhesion molecule-1 (E-selectin) expression on endothelial cells (EC). The expression of these molecules and others on the vascular endothelium determines the efficiency with which leukocytes may adhere to the local vasculature and extravasate into the local tissue during the development of an inflammatory response. The local concentration of cytokines and growth factor participate in the modulation of the expression of these CAMs.

[1053] Briefly, endothelial cells (e.g., Human Umbilical Vein Endothelial cells (HUVECs)) are grown in a standard 96 well plate to confluence, growth medium is removed from the cells and replaced with 100 μl of 199 Medium (10% fetal bovine serum (FBS)). Samples for testing and positive or negative controls are added to the plate in triplicate (in 10 μl volumes). Plates are then incubated at 37° C. for either 5 h (selectin and integrin expression) or 24 h (integrin expression only). Plates are aspirated to remove medium and 100 μl of 0.1% paraformaldehyde-PBS (with Ca++ and Mg++) is added to each well. Plates are held at 4° C. for 30 min. Fixative is removed from the wells and wells are washed 1× with PBS(+Ca,Mg)+0.5% BSA and drained. 10 μl of diluted primary antibody is added to the test and control wells. Anti-ICAM-1-Biotin, Anti-VCAM-1-Biotin and Anti-E-selectin-Biotin are used at a concentration of 10 μg/ml (1:10 dilution of 0.1 mg/ml stock antibody). Cells are incubated at 37° C. for 30 min. in a humidified environment. Wells are washed three times with PBS(+Ca,Mg)+0.5% BSA. 20 μl of diluted ExtrAvidin-Alkaline Phosphatase (1:5,000 dilution, referred to herein as the working dilution) are added to each well and incubated at 37° C. for 30 min. Wells are washed three times with PBS(+Ca,Mg)+0.5% BSA. Dissolve 1 tablet of p-Nitrophenol Phosphate pNPP per 5 ml of glycine buffer (pH 10.4). 100 μl of pNPP substrate in glycine buffer is added to each test well. Standard wells in triplicate are prepared from the working dilution of the ExtrAvidin-Alkaline Phosphotase in glycine buffer: 1:5,000 (10⁰)>10^{-0.5}>10⁻¹>10^{-1.5}. 5 μl of each dilution is added to triplicate wells and the resulting AP content in each well is 5.50 ng, 1.74 ng, 0.55 ng, 0.18 ng. 100 μl of pNNP reagent is then added to each of the standard wells. The plate is incubated at 37° C. for 4 h. A volume of 50 μl of 3M NaOH is added to all wells. The plate is read on a plate reader at 405 nm using the background subtraction option on blank wells filled with glycine buffer only. Additionally, the template is set up to indicate the concentration of AP-conjugate in each standard well [5.50 ng; 1.74 ng; 0.55 ng; 0.18 ng]. Results are indicated as amount of bound AP-conjugate in each sample.

### Example 36

### Alamar Blue Endothelial Cells Proliferation Assay

[1054] This assay may be used to quantitatively determine protein mediated inhibition of bFGF-induced proliferation of Bovine Lymphatic Endothelial Cells (LECs), Bovine Aortic Endothelial Cells (BAECs) or Human Microvascular Uterine Myometrial Cells (UTMECs). This assay incorporates a fluorometric growth indicator based on detection of metabolic activity. A standard Alamar Blue Proliferation Assay is prepared in EGM-2MV with 10 ng/ml of bFGF added as a source of endothelial cell stimulation. This assay may be used with a variety of endothelial cells with slight changes in growth medium and cell concentration. Dilutions of the protein batches to be tested are diluted as appropriate. Serum-free medium (GIBCO SFM) without bFGF is used as a non-stimulated control and Angiostatin or TSP-1 are included as a known inhibitory controls.

[1055] Briefly, LEC, BAECs or UTMECs are seeded in growth media at a density of 5000 to 2000 cells/well in a 96 well plate and placed at 37 degrees C. overnight. After the overnight incubation of the cells, the growth media is removed and replaced with GIBCO EC-SFM. The cells are treated with the appropriate dilutions of the protein of interest or control protein sample(s) (prepared in SFM) in triplicate wells with additional bFGF to a concentration of 10 ng/ml. Once the cells have been treated with the samples, the plate(s) is/are placed back in the 37° C. incubator for three days. After three days 10 ml of stock alamar blue (Biosource Cat# DALI1100) is added to each well and the plate(s) is/are placed back in the 37° C. incubator for four hours. The plate(s) are then read at 530 nm excitation and 590 nm emission using the CytoFluor fluorescence reader. Direct output is recorded in relative fluorescence units.

[1056] Alamar blue is an oxidation-reduction indicator that both fluoresces and changes color in response to chemical reduction of growth medium resulting from cell growth. As cells grow in culture, innate metabolic activity results in a chemical reduction of the immediate surrounding environment. Reduction related to growth causes the indicator to change from oxidized (non-fluorescent blue) form to reduced (fluorescent red) form (i.e., stimulated proliferation will produce a stronger signal and inhibited proliferation will produce a weaker signal and the total signal is proportional to the total number of cells as well as their metabolic activity). The background level of activity is observed with the starvation medium alone. This is compared to the output observed from the positive control samples (bFGF in growth medium) and protein dilutions.

### Example 37

### Detection of Inhibition of a Mixed Lymphocyte Reaction

[1057] This assay can be used to detect and evaluate inhibition of a Mixed Lymphocyte Reaction (MLR) by gene products (e.g., isolated polypeptides). Inhibition of a MLR may be due to a direct effect on cell proliferation and viability, modulation of costimulatory molecules on interacting cells, modulation of adhesiveness between lymphocytes and accessory cells, or modulation of cytokine production by accessory cells. Multiple cells may be targeted by these polypeptides since the peripheral blood mononuclear fraction used in this assay includes T, B and natural killer lymphocytes, as well as monocytes and dendritic cells.

[1058] Polypeptides of interest found to inhibit the MLR may find application in diseases associated with lymphocyte and monocyte activation or proliferation. These include, but are not limited to, diseases such as asthma, arthritis, diabetes, inflammatory skin conditions, psoriasis, eczema, systemic lupus erythematosus, multiple sclerosis, glomerulonephritis, inflammatory bowel disease, crohn's disease, ulcerative colitis, arteriosclerosis, cirrhosis, graft vs. host disease, host vs. graft disease, hepatitis, leukemia and lymphoma.

[1059] Briefly, PBMCs from human donors are purified by density gradient centrifugation using Lymphocyte Separation Medium (LSM®, density 1.0770 g/ml, Organon Teknika Corporation, West Chester, Pa.). PBMCs from two donors are adjusted to 2×10⁶ cells/ml in RPMI-1640 (Life Technologies, Grand Island, N.Y.) supplemented with 10% FCS and 2 mM glutamine. PBMCs from a third donor is adjusted to 2×10⁵ cells/ml. Fifty microliters of PBMCs from each donor is added to wells of a 96-well round bottom microtiter plate. Dilutions of test materials (50 μl) is added in triplicate to microtiter wells. Test samples (of the protein of interest) are added for final dilution of 1:4; rhuIL-2 (R&D Systems, Minneapolis, Minn., catalog number 202-IL) is added to a final concentration of 1 μg/ml; anti-CD4 mAb (R&D Systems, clone 34930.11, catalog number MAB379) is added to a final concentration of 10 μg/ml. Cells are cultured for 7-8 days at 37° C. in 5% CO₂, and 1 μC of [³H] thymidine is added to wells for the last 16 hrs of culture. Cells are harvested and thymidine incorporation determined using a Packard TopCount. Data is expressed as the mean and standard deviation of triplicate determinations.

[1060] Samples of the protein of interest are screened in separate experiments and compared to the negative control treatment, anti-CD4 mAb, which inhibits proliferation of lymphocytes and the positive control treatment, IL-2 (either as recombinant material or supernatant), which enhances proliferation of lymphocytes.

[1061] One skilled in the art could easily modify the exemplified studies to test the activity of polynucleotides (e.g., gene therapy), antibodies, agonists, and/or antagonists and fragments and variants thereof.

### Example 38

### Assays for Protease Activity

[1062] The following assay may be used to assess protease activity of the polypeptides of the invention.

[1063] Gelatin and casein zymography are performed essentially as described (Heusen et al., Anal. Biochem., 102:196-202 (1980); Wilson et al., Journal of Urology, 149:653-658 (1993)). Samples are run on 10% polyacryamide/0.1% SDS gels containing 1% gelain orcasein, soaked in 2.5% triton at room temperature for 1 hour, and in 0.1M glycine, pH 8.3 at 37° C. 5 to 16 hours. After staining in amido black areas of proteolysis apear as clear areas agains the blue-black background. Trypsin (Sigma T8642) is used as a positive control.

[1064] Protease activity is also determined by monitoring the cleavage of n-a-benzoyl-L-arginine ethyl ester (BAEE) (Sigma B-4500. Reactions are set up in (25 mMNaPO₄, 1 mM EDTA, and 1 mM BAEE), pH 7.5. Samples are added and the change in adsorbance at 260 nm is monitored on the Beckman DU-6 spectrophotometer in the time-drive mode. Trypsin is used as a positive control.

[1065] Additional assays based upon the release of acid-soluble peptides from casein or hemoglobin measured as adsorbance at 280 nm or colorimetrically using the Folin method are performed as described in Bergmeyer, et al., Methods of Enzymatic Analysis, 5 (1984). Other assays involve the solubilization of chromogenic substrates (Ward, Applied Science, 251-317 (1983)).

### Example 39

### Identifying Serine Protease Substrate Specificity

[1066] Methods known in the art or described herein may be used to determine the substrate specificity of the polypeptides of the present invention having serine protease activity. A preferred method of determining substrate specificity is by the use of positional scanning synthetic combinatorial libraries as described in GB 2 324 529 (incorporated herein in its entirety).

### Example 40

### Ligand Binding Assays

[1067] The following assay may be used to assess ligand binding activity of the polypeptides of the invention.

[1068] Ligand binding assays provide a direct method for ascertaining receptor pharmacology and are adaptable to a high throughput format. The purified ligand for a polypeptide is radiolabeled to high specific activity (50-2000 Ci/mmol) for binding studies. A determination is then made that the process of radiolabeling does not diminish the activity of the ligand towards its polypeptide. Assay conditions for buffers, ions, pH and other modulators such as nucleotides are optimized to establish a workable signal to noise ratio for both membrane and whole cell polypeptide sources. For these assays, specific polypeptide binding is defined as total associated radioactivity minus the radioactivity measured in the presence of an excess of unlabeled competing ligand. Where possible, more than one competing ligand is used to define residual nonspecific binding.

### Example 41

### Functional Assay in Xenopus Oocytes

[1069] Capped RNA transcripts from linearized plasmid templates encoding the polypeptides of the invention are synthesized in vitro with RNA polymerases in accordance with standard procedures. In vitro transcripts are suspended in water at a final concentration of 0.2 mg/ml. Ovarian lobes are removed from adult female toads, Stage V defolliculated oocytes are obtained, and RNA transcripts (10 ng/oocytc) are injected in a 50 nl bolus using a microinjection apparatus. Two electrode voltage clamps are used to measure the currents from individual Xenopus oocytes in response polypeptides and polypeptide agonist exposure. Recordings are made in Ca2+ free Barth's medium at room temperature. The Xenopus system can be used to screen known ligands and tissue/cell extracts for activating ligands.

### Example 42

### Microphysiometric Assays

[1070] Activation of a wide variety of secondary messenger systems results in extrusion of small amounts of acid from a cell. The acid formed is largely as a result of the increased metabolic activity required to fuel the intracellular signaling process. The pH changes in the media surrounding the cell are very small but are detectable by the CYTOSENSOR microphysiometer (Molecular Devices Ltd., Menlo Park, Calif.). The CYTOSENSOR is thus capable of detecting the activation of polypeptide which is coupled to an energy utilizing intracellular signaling pathway.

### Example 43

### Extract/Cell Supernatant Screening

[1071] A large number of mammalian receptors exist for which there remains, as yet, no cognate activating ligand (agonist). Thus, active ligands for these receptors may not be included within the ligands banks as identified to date. Accordingly, the polypeptides of the invention can also be functionally screened (using calcium, cAMP, microphysiometer, oocyte electrophysiology, etc., functional screens) against tissue extracts to identify its natural ligands. Extracts that produce positive functional responses can be sequentially subfractionated until an activating ligand is isolated and identified.

### Example 44

### Calcium and cAMP Functional Assays

[1072] Seven transmembrane receptors which are expressed in HEK 293 cells have been shown to be coupled functionally to activation of PLC and calcium mobilization and/or cAMP stimulation or inhibition. Basal calcium levels in the HEK 293 cells in receptor-transfected or vector control cells were observed to be in the normal, 100 nM to 200 nM, range. HEK 293 cells expressing recombinant receptors are loaded with fura 2 and in a single day >150 selected ligands or tissue/cell extracts are evaluated for agonist induced calcium mobilization. Similarly, HEK 293 cells expressing recombinant receptors are evaluated for the stimulation or inhibition of cAMP production using standard cAMP quantitation assays. Agonists presenting a calcium transient or cAMP fluctuation are tested in vector control cells to determine if the response is unique to the transfected cells expressing receptor.

### Example 45

### ATP-Binding Assay

[1073] The following assay may be used to assess ATP-binding activity of polypeptides of the invention.

[1074] ATP-binding activity of the polypeptides of the invention may be detected using the ATP-binding assay described in U.S. Pat. No. 5,858,719, which is herein incorporated by reference in its entirety. Briefly, ATP-binding to polypeptides of the invention is measured via photoaffinity labeling with 8-azido-ATP in a competition assay. Reaction mixtures containing 1 mg/ml of the ABC transport protein of the present invention are incubated with varying concentrations of ATP, or the non-hydrolyzable ATP analog adenyl-5′-imidodiphosphate for 10 minutes at 4° C. A mixture of 8-azido-ATP (Sigma Chem. Corp., St. Louis, Mo.) plus 8-azido-ATP (³²P-ATP) (5 mCi/μmol, ICN, Irvine Calif.) is added to a final concentration of 100 μM and 0.5 ml aliquots are placed in the wells of a porcelain spot plate on ice. The plate is irradiated using a short wave 254 nm UV lamp at a distance of 2.5 cm from the plate for two one-minute intervals with a one-minute cooling interval in between. The reaction is stopped by addition of dithiothreitol to a final concentration of 2 mM. The incubations are subjected to SDS-PAGE electrophoresis, dried, and autoradiographed. Protein bands corresponding to the particular polypeptides of the invention are excised, and the radioactivity quantified. A decrease in radioactivity with increasing ATP or adenly-5′-imidodiphosphate provides a measure of ATP affinity to the polypeptides.

### Example 46

### Small Molecule Screening

[1075] This invention is particularly useful for screening therapeutic compounds by using the polypeptides of the invention, or binding fragments thereof, in any of a variety of drug screening techniques. The polypeptide or fragment employed in such a test may be affixed to a solid support, expressed on a cell surface, free in solution, or located intracellularly. One method of drug screening utilizes eukaryotic or prokaryotic host cells which are stably transformed with recombinant nucleic acids expressing the polypeptide or fragment. Drugs are screened against such transformed cells in competitive binding assays. One may measure, for example, the formulation of complexes between the agent being tested and polypeptide of the invention.

[1076] Thus, the present invention provides methods of screening for drugs or any other agents which affect activities mediated by the polypeptides of the invention. These methods comprise contacting such an agent with a polypeptide of the invention or fragment thereof and assaying for the presence of a complex between the agent and the polypeptide or fragment thereof, by methods well known in the art. In such a competitive binding assay, the agents to screen are typically labeled. Following incubation, free agent is separated from that present in bound form, and the amount of free or uncomplexed label is a measure of the ability of a particular agent to bind to the polypeptides of the invention.

[1077] Another technique for drug screening provides high throughput screening for compounds having suitable binding affinity to the polypeptides of the invention, and is described in great detail in European Patent Application 84/03564, published on Sep. 13, 1984, which is herein incorporated by reference in its entirety. Briefly stated, large numbers of different small molecule test compounds are synthesized on a solid substrate, such as plastic pins or some other surface. The test compounds are reacted with polypeptides of the invention and washed. Bound polypeptides are then detected by methods well known in the art. Purified polypeptides are coated directly onto plates for use in the aforementioned drug screening techniques. In addition, non-neutralizing antibodies may be used to capture the peptide and immobilize it on the solid support.

[1078] This invention also contemplates the use of competitive drug screening assays in which neutralizing antibodies capable of binding polypeptides of the invention specifically compete with a test compound for binding to the polypeptides or fragments thereof. In this manner, the antibodies are used to detect the presence of any peptide which shares one or more antigenic epitopes with a polypeptide of the invention.

### Example 47

### Phosphorylation Assay

[1079] In order to assay for phosphorylation activity of the polypeptides of the invention, a phosphorylation assay as described in U.S. Pat. No. 5,958,405 (which is herein incorporated by reference) is utilized. Briefly, phosphorylation activity may be measured by phosphorylation of a protein substrate using gamma-labeled ³²P-ATP and quantitation of the incorporated radioactivity using a gamma radioisotope counter. The polypeptides of the invention are incubated with the protein substrate, ³²P-ATP, and a kinase buffer. The ³²P incorporated into the substrate is then separated from free ³²P-ATP by electrophoresis, and the incorporated ³²P is counted and compared to a negative control. Radioactivity counts above the negative control are indicative of phosphorylation activity of the polypeptides of the invention.

### Example 48

### Detection of Phosphorylation Activity (Activation) of the Polypeptides of the Invention in the Presence of Polypeptide Ligands

[1080] Methods known in the art or described herein may be used to determine the phosphorylation activity of the polypeptides of the invention. A preferred method of determining phosphorylation activity is by the use of the tyrosine phosphorylation assay as described in U.S. Pat. No. 5,817,471 (incorporated herein by reference).

### Example 49

### Identification of Signal Transduction Proteins that Interact with Polypeptides of the Present Invention

[1081] The purified polypeptides of the invention are research tools for the identification, characterization and purification of additional signal transduction pathway proteins or receptor proteins. Briefly, labeled polypeptides of the invention are useful as reagents for the purification of molecules with which it interacts. In one embodiment of affinity purification, polypeptides of the invention are covalently coupled to a chromatography column. Cell-free extract derived from putative target cells, such as carcinoma tissues, is passed over the column, and molecules with appropriate affinity bind to the polypeptides of the invention. The protein complex is recovered from the column, dissociated, and the recovered molecule subjected to N-terminal protein sequencing. This amino acid sequence is then used to identify the captured molecule or to design degenerate oligonucleotide probes for cloning the relevant gene from an appropriate cDNA library.

### Example 50

### IL-6 Bioassay

[1082] To test the proliferative effects of the polypeptides of the invention, the IL-6 Bioassay as described by Marz et al. is utilized (Proc. Natl. Acad. Sci., U.S.A., 95:3251-56 (1998), which is herein incorporated by reference). Briefly, IL-6 dependent B9 murine cells are washed three times in IL-6 free medium and plated at a concentration of 5,000 cells per well in 50 μl, and 50 μl of the IL-6-like polypeptide is added. After 68 hrs. at 37° C., the number of viable cells is measured by adding the tetrazolium salt thiazolyl blue (MTT) and incubating for a further 4 hrs. at 37° C. B9 cells are lysed by SDS and optical density is measured at 570 nm. Controls containing IL-6 (positive) and no cytokine (negative) are utilized. Enhanced proliferation in the test sample(s) relative to the negative control is indicative of proliferative effects mediated by polypeptides of the invention.

### Example 51

### Assay for Phosphatase Activity

[1083] The following assay may be used to assess serine/threonine phosphatase (PTPase) activity of the polypeptides of the invention.

[1084] In order to assay for serine/threonine phosphatase (PTPase) activity, assays can be utilized which are widely known to those skilled in the art. For example, the serine/threonine phosphatase (PSPase) activity is measured using a PSPase assay kit from New England Biolabs, Inc. Myelin basic protein (MyBP), a substrate for PSPase, is phosphorylated on serine and threonine residues with cAMP-dependent Protein Kinase in the presence of [³²P]ATP. Protein serine/threonine phosphatase activity is then determined by measuring the release of inorganic phosphate from 32P-labeled MyBP.

### Example 52

### Interaction of Serine/Threonine Phosphatases with Other Proteins

[1085] The polypeptides of the invention with serine/threonine phosphatase activity as determined in Example 51 are research tools for the identification, characterization and purification of additional interacting proteins or receptor proteins, or other signal transduction pathway proteins. Briefly, labeled polypeptide(s) of the invention is useful as a reagent for the purification of molecules with which it interacts. In one embodiment of affinity purification, polypeptide of the invention is covalently coupled to a chromatography column. Cell-free extract derived from putative target cells, such as neural or liver cells, is passed over the column, and molecules with appropriate affinity bind to the polypeptides of the invention. The polypeptides of the invention—complex is recovered from the column, dissociated, and the recovered molecule subjected to N-terminal protein sequencing. This amino acid sequence is then used to identify the captured molecule or to design degenerate oligonucleotide probes for cloning the relevant gene from an appropriate cDNA library.

### Example 53

### Assaying for Heparanase Activity

[1086] In order to assay for heparanase activity of the polypeptides of the invention, the heparanase assay described by Vlodavsky et al is utilized (Vlodavsky, I., et al., Nat. Med., 5:793-802 (1999)). Briefly, cell lysates, conditioned media or intact cells (1×10⁶ cells per 35-mm dish) are incubated for 18 hrs at 37° C., pH 6.2-6.6, with ³⁵S-labeled ECM or soluble ECM derived peak I proteoglycans. The incubation medium is centrifuged and the supernatant is analyzed by gel filtration on a Sepharose CL-6B column (0.9×30 cm). Fractions are eluted with PBS and their radioactivity is measured. Degradation fragments of heparan sulfate side chains are eluted from Sepharose 6B at 0.5<Kₐᵥ<0.8 (peak II). Each experiment is done at least three times. Degradation fragments corresponding to “peak II,” as described by Vlodavsky et al., is indicative of the activity of the polypeptides of the invention in cleaving heparan sulfate.

### Example 54

### Immobilization of Biomolecules

[1087] This example provides a method for the stabilization of polypeptides of the invention in non-host cell lipid bilayer constucts (see, e.g., Bieri et al., Nature Biotech 17:1105-1108 (1999), hereby incorporated by reference in its entirety herein) which can be adapted for the study of polypeptides of the invention in the various functional assays described above. Briefly, carbohydrate-specific chemistry for biotinylation is used to confine a biotin tag to the extracellular domain of the polypeptides of the invention, thus allowing uniform orientation upon immobilization. A 50 uM solution of polypeptides of the invention in washed membranes is incubated with 20 mM NaIO4 and 1.5 mg/ml (4 mM) BACH or 2 mg/ml (7.5 mM) biotin-hydrazide for 1 hr at room temperature (reaction volume, 150 ul). Then the sample is dialyzed (Pierce Slidealizer Cassett, 10 kDa cutoff; Pierce Chemical Co., Rockford Ill.) at 4 C first for 5 h, exchanging the buffer after each hour, and finally for 12 h against 500 ml buffer R (0.15 M NaCl, 1 mM MgCl2, 10 mM sodium phosphate, pH7). Just before addition into a cuvette, the sample is diluted 1:5 in buffer ROG50 (Buffer R supplemented with 50 mM octylglucoside).

### Example 55

### Taqman

[1088] Quantitative PCR (QPCR). Total RNA from cells in culture are extracted by Trizol separation as recommended by the supplier (LifeTechnologies). (Total RNA is treated with DNase I (Life-Technologies) to remove any contaminating genomic DNA before reverse transcription.) Total RNA (50 ng) is used in a one-step, 50 ul, RT-QPCR, consisting of Taqman Buffer A (Perkin-Elmer; 50 mM KCl/10 mM Tris, pH 8.3), 5.5 mM MgCl₂, 240 μM each dNTP, 0.4 units RNase Inhibitor (Promega), 8% glycerol, 0.012% Tween-20, 0.05% gelatin, 0.3 uM primers, 0.1 uM probe, 0.025 units Amplitaq Gold (Perkin-Elmer) and 2.5 units Superscript II reverse transcriptase (Life Technologies). As a control for genomic contamination, parallel reactions are setup without reverse transcriptase. The relative abundance of (unknown) and 18S RNAs are assessed by using the Applied Biosystems Prism 7700 Sequence Detection System (Livak, K. J., Flood, S. J., Marmaro, J., Giusti, W. & Deetz, K. (1995) PCR Methods Appl. 4, 357-362). Reactions are carried out at 48° C. for 30 min, 95° C. for 10 min, followed by 40 cycles of 95° C. for 15 s, 60° C. for 1 min. Reactions are perfommed in triplicate.

[1089] Primers (f & r) and FRET probes sets are designed using Primer Express Software (Perkin-Elmer). Probes are labeled at the 5′-end with the reporter dye 6-FAM and on the 3′-end with the quencher dye TAMRA (Biosource International, Camarillo, Calif. or Perkin-Elmer).

### Example 56

### Assays for Metalloproteinase Activity

[1090] Metalloproteinases (EC 3.4.24.-) are peptide hydrolases which use metal ions, such as Zn²⁺, as the catalytic mechanism. Metalloproteinase activity of polypeptides of the present invention can be assayed according to the following methods.

Proteolysis of Alpha-2-macroglobulin

[1091] To confirm protease activity, purified polypeptides of the invention are mixed with the substrate alpha-2-macroglobulin (0.2 unit/ml; Boehringer Mannheim, Germany) in 1× assay buffer (50 mM HEPES, pH 7.5, 0.2 M NaCl, 10 mM CaCl₂, 25 μM ZnCl₂ and 0.05% Brij-35) and incubated at 37° C. for 1-5 days. Trypsin is used as positive control. Negative controls contain only alpha-2-macroglobulin in assay buffer. The samples are collected and boiled in SDS-PAGE sample buffer containing 5% 2-mercaptoethanol for 5-min, then loaded onto 8% SDS-polyacrylamide gel. After electrophoresis the proteins are visualized by silver staining. Proteolysis is evident by the appearance of lower molecular weight bands as compared to the negative control.

Inhibition of Alpha-2-macroglobulin Proteolysis by Inhibitors of Metalloproteinases

[1092] Known metalloproteinase inhibitors (metal chelators (EDTA, EGTA, AND HgCl₂), peptide metalloproteinase inhibitors (TIMP-1 and TIMP-2), and commercial small molecule MMP inhibitors) are used to characterize the proteolytic activity of polypeptides of the invention. The three synthetic MMP inhibitors used are: MMP inhibitor I, [IC₅₀=1.0 μM against MMP-1 and MMP-8; IC₅₀=30 μM against MMP-9; IC₅₀=150 μM against MMP-3]; MMP-3 (stromelysin-1) inhibitor I [IC₅₀=5 μM against MMP-3], and MMP-3 inhibitor II [Kᵢ=130 nM against MMP-3]; inhibitors available through Calbiochem, catalog # 444250, 444218, and 444225, respectively). Briefly, different concentrations of the small molecule MMP inhibitors are mixed with purified polypeptides of the invention (50 μg/ml) in 22.9 μl of 1×HEPES buffer (50 mM HEPES, pH 7.5, 0.2 M NaCl, 10 mM CaCl₂, 25 μM ZnCl₂ and 0.05% Brij-35) and incubated at room temperature (24° C.) for 2-hr, then 7.1 μl of substrate alpha-2-macroglobulin (0.2 unit/ml) is added and incubated at 37° C. for 20-hr. The reactions are stopped by adding 4× sample buffer and boiled immediately for 5 minutes. After SDS-PAGE, the protein bands are visualized by silver stain.

[1093] Synthetic Fluorogenic Peptide Substrates Cleavage Assay

[1094] The substrate specificity for polypeptides of the invention with demonstrated metalloproteinase activity can be determined using synthetic fluorogenic peptide substrates (purchased from BACHEM Bioscience Inc). Test substrates include, M-1985, M-2225, M-2105, M-2110, and M-2255. The first four are MMP substrates and the last one is a substrate of tumor necrosis factor-α (TNF-α) converting enzyme (TACE). All the substrates are prepared in 1:1 dimethyl sulfoxide (DMSO) and water. The stock solutions are 50-500 μM. Fluorescent assays are performed by using a Perkin Elmer LS 50B luminescence spectrometer equipped with a constant temperature water bath. The excitation λ is 328 nm and the emission λ is 393 nm. Briefly, the assay is carried out by incubating 176 μl 1×HEPES buffer (0.2 M NaCl, 10 mM CaCl₂, 0.05% Brij-35 and 50 mM HEPES, pH 7.5) with 4 μl of substrate solution (50 μM) at 25° C. for 15 minutes, and then adding 20 μl of a purified polypeptide of the invention into the assay cuvett. The final concentration of substrate is 1 μM. Initial hydrolysis rates are monitored for 30-min.

### Example 57

### Characterization of the cDNA Contained in a Deposited Plasmid

[1095] The size of the cDNA insert contained in a deposited plasmid may be routinely determined using techniques known in the art, such as PCR amplification using synthetic primers hybridizable to the 3′ and 5′ ends of the cDNA sequence. For example, two primers of 17-30 nucleotides derived from each end of the cDNA (i.e., hybridizable to the absolute 5′ nucleotide or the 3′ nucleotide end of the sequence of SEQ ID NO:X, respectively) are synthesized and used to amplify the cDNA using the deposited cDNA plasmid as a template. The polymerase chain reaction is carried out under routine conditions, for instance, in 25 ul of reaction mixture with 0.5 ug of the above cDNA template. A convenient reaction mixture is 1.5-5 mM MgCl₂, 0.01% (w/v) gelatin, 20 uM each of dATP, dCTP, dGTP, dTTP, 25 pmol of each primer and 0.25 Unit of Taq polymerase. Thirty five cycles of PCR (denaturation at 94 degree C. for 1 min; annealing at 55 degree C. for 1 min; elongation at 72 degree C. for 1 min) are performed with a Perkin-Elmer Cetus automated thermal cycler. The amplified product is analyzed by agarose gel electrophoresis. The PCR product is verified to be the selected sequence by subcloning and sequencing the DNA product. It will be clear that the invention may be practiced otherwise than as particularly described in the foregoing description and examples. Numerous modifications and variations of the present invention are possible in light of the above teachings and, therefore, are within the scope of the appended claims.

### INCORPORATION BY REFERENCE

[1096] The entire disclosure of each document cited (including patents, patent applications, journal articles, abstracts, laboratory manuals, books, or other disclosures) in the Background of the Invention, Detailed Description, and Examples is hereby incorporated herein by reference. In addition, the sequence listing submitted herewith is incorporated herein by reference in its entirety. The specification and sequence listing of each of the following U.S. and PCT applications are herein incorporated by reference in their entirety (filing dates shown in format “year-month-day” (yyyy-mm-dd)): Application No. 60/278,650 filed on Mar. 27, 2001, application Ser. No. 09/950,082 filed on Sep. 12, 2001, application Ser. No. 09/950,083 filed on Sep. 12, 2001, Application No. 60/306,171 filed on 19 Jul. 2001, application Ser. No. 09/833,245 filed on Apr. 12, 2001, Application No. PCT/US01/11988 filed on Apr. 12, 2001, Application No. 60/331,287 filed on Nov. 13, 2001, Application No. 60/277,340 filed on Mar. 21, 2001, Application No. PCT/US00/06043 filed on Mar. 4, 2000, Application No. PCT/US00/06012 filed on Mar. 9, 2000, Application No. PCT/US00/06058 filed on Mar. 9, 2000, Application No. PCT/US00/06044 filed on Mar. 9, 2000, Application No. PCT/US00/06059 filed on Mar. 9, 2000, Application No. PCT/US00/06042 filed on Mar. 9, 2000, Application No. PCT/US00/06014 filed on Mar. 9, 2000, Application No. PCT/US00/06013 filed on Mar. 9, 2000, Application No. PCT/US00/06049 filed on Mar. 9, 2000, Application No. PCT/US00/06057 filed on Mar. 9, 2000, Application No. PCT/US00/06824 filed on Mar. 16, 2000, Application No. PCT/US00/06765 filed on Mar. 16, 2000, Application No. PCT/US00/06792 filed on Mar. 16, 2000, Application No. PCT/US00/06830 filed on Mar. 16, 2000, Application No. PCT/US00/06782 filed on Mar. 16, 2000, Application No. PCT/US00/06822 filed on Mar. 16, 2000, Application No. PCT/US00/06791 filed on Mar. 16, 2000, Application No. PCT/US00/06828 filed on Mar. 16, 2000, Application No. PCT/US00/06823 filed on Mar. 16, 2000, Application No. PCT/US00/06781 filed on Mar. 16, 2000, Application No. PCT/US00/07505 filed on Mar. 22, 2000, Application No. PCT/US00/07440 filed on Mar. 22, 2000, Application No. PCT/US00/07506 filed on Mar. 22, 2000, Application No. PCT/US00/07507 filed on Mar. 22, 2000, Application No. PCT/US00/07535 filed on Mar. 22, 2000, Application No. PCT/US00/07525 filed on Mar. 22, 2000, Application No. PCT/US00/07534 filed on Mar. 22, 2000, Application No. PCT/US00/07483 filed on Mar. 22, 2000, Application No. PCT/US00/07526 filed on Mar. 22, 2000, Application No. PCT/US00/07527 filed on Mar. 22, 2000, Application No. PCT/US00/07661 filed on Mar. , 200023, Application No. PCT/US00/07579 filed on Mar. , 200023, Application No. PCT/US00/07723 filed on Mar. , 200023, Application No. PCT/US00/07724 filed on Mar. , 200023, Application No. PCT/US00/14929 filed on Jun. 1, 2000, Application No. PCT/US00/07722 filed on Mar. , 200023, Application No. PCT/US00/07578 filed on Mar. , 200023, Application No. PCT/US00/07726 filed on Mar. , 200023, Application No. PCT/US00/07677 filed on Mar. , 200023, Application No. PCT/US00/07725 filed on Mar. , 200023, Application No. PCT/US00/09070 filed on Apr. 6, 2000, Application No. PCT/US00/08982 filed on Apr. 6, 2000, Application No. PCT/US00/08983 filed on Apr. 6, 2000, Application No. PCT/US00/09067 filed on Apr. 6, 2000, Application No. PCT/US00/09066 filed on Apr. 6, 2000, Application No. PCT/US00/09068 filed on Apr. 6, 2000, Application No. PCT/US00/08981 filed on Apr. 6, 2000, Application No. PCT/US00/08980 filed on Apr. 6, 2000, Application No. PCT/US00/09071 filed on Apr. 6, 2000, Application No. PCT/US00/09069 filed on Apr. 6, 2000, Application No. PCT/US00/15136 filed on Jun. 1, 2000, Application No. PCT/US00/14926 filed on Jun. 1, 2000, Application No. PCT/US00/14963 filed on Jun. 1, 2000, Application No. PCT/US00/15135 filed on Jun. 1, 2000, Application No. PCT/US00/14934 filed on Jun. 1, 2000, Application No. PCT/US00/14933 filed on Jun. 1, 2000, Application No. PCT/US00/15137 filed on Jun. 1, 2000, Application No. PCT/US00/14928 filed on Jun. 1, 2000, Application No. PCT/US00/14973 filed on Jun. 1, 2000, Application No. PCT/US00/14964 filed on Jun. 1, 2000, Application No. PCT/US00/26376 filed on Sep. 26, 2000, Application No. PCT/US00/26371 filed on Sep. 26, 2000, Application No. PCT/US00/26324 filed on Sep. 26, 2000, Application No. PCT/US00/26323 filed on Sep. 26, 2000, Application No. PCT/US00/26337 filed on Sep. 26, 2000, Application No. PCT/US01/13318 filed on Apr. 27, 2001, Application No. U.S. 60/124,146 filed on Mar. 12, 1999, Application No. U.S. 60/167,061 filed on Nov. 23, 1999, Application No. U.S. 60/124,093 filed on Mar. 12, 1999, Application No. U.S. 60/166,989 filed on Nov. 23, 1999, Application No. U.S. 60/124,145 filed on Mar. 12, 1999, Application No. U.S. 60/168,654 filed on Dec. 3, 1999, Application No. U.S. 60/124,099 filed on Mar. 12, 1999, Application No. U.S. 60/168,661 filed on Dec. 3, 1999, Application No. U.S. 60/124,096 filed on Mar. 12, 1999, Application No. U.S. 60/168,622 filed on Dec. 3, 1999, Application No. U.S. 60/124,143 filed on Mar. 12, 1999, Application No. U.S. 60/168,663 filed on Dec. 3, 1999, Application No. U.S. 60/124,095 filed on Mar. 12, 1999, Application No. U.S. 60/138,598 filed on Jun. 11, 1999, Application No. U.S. 60/168,665 filed on Dec. 3, 1999, Application No. U.S. 60/125,360 filed on Mar. 19, 1999, Application No. U.S. 60/138,626 filed on Jun. 11, 1999, Application No. U.S. 60/168,662 filed on Dec. 3, 1999, Application No. U.S. 60/124,144 filed on Mar. 12, 1999, Application No. U.S. 60/138,574 filed on Jun. 11, 1999, Application No. U.S. 60/168,667 filed on Dec. 3, 1999, Application No. U.S. 60/124,142 filed on Mar. 12, 1999, Application No. U.S. 60/138,597 filed on Jun. 11, 1999, Application No. U.S. 60/168,666 filed on Dec. 3, 1999, Application No. U.S. 60/125,359 filed on Mar. 19, 1999, Application No. U.S. 60/168,664 filed on Dec. 3, 1999, Application No. U.S. 60/126,051 filed on Mar. 23, 1999, Application No. U.S. 60/169,906 filed on Dec. 10, 1999, Application No. U.S. 60/125,362 filed on Mar. 19, 1999, Application No. U.S. 60/169,980 filed on Dec. 10, 1999, Application No. U.S. 60/125,361 filed on Mar. 19, 1999, Application No. U.S. 60/169,910 filed on Dec. 10, 1999, Application No. U.S. 60/125,812 filed on Mar. 23, 1999, Application No. U.S. 60/169,936 filed on Dec. 10, 1999, Application No. U.S. 60/126,054 filed on Mar. 23, 1999, Application No. U.S. 60/169,916 filed on Dec. 10, 1999, Application No. U.S. 60/125,815 filed on Mar. 23, 1999, Application No. U.S. 60/169,946 filed on Dec. 10, 1999, Application No. U.S. 60/125,358 filed on Mar. 19, 1999, Application No. U.S. 60/169,616 filed on Dec. 8, 1999, Application No. U.S. 60/125,364 filed on Mar. 19, 1999, Application No. U.S. 60/169,623 filed on Dec. 8, 1999, Application No. U.S. 60/125,363 filed on Mar. 19, 1999, Application No. U.S. 60/169,617 filed on Dec. 8, 1999, Application No. U.S. 60/126,502 filed on Mar. 26, 1999, Application No. U.S. 60/172,410 filed on Dec. 17, 1999, Application No. U.S. 60/126,503 filed on Mar. 26, 1999, Application No. U.S. 60/172,409 filed on Dec. 17, 1999, Application No. U.S. 60/126,505 filed on Mar. 26, 1999, Application No. U.S. 60/172,412 filed on Dec. 17, 1999, Application No. U.S. 60/126,594 filed on Mar. 26, 1999, Application No. U.S. 60/172,408 filed on Dec. 17, 1999, Application No. U.S. 60/126,511 filed on Mar. 26, 1999, Application No. U.S. 60/172,413 filed on Dec. 17, 1999, Application No. U.S. 60/126,595 filed on Mar. 26, 1999, Application No. U.S. 60/171,549 filed on Dec. 22, 1999, Application No. U.S. 60/126,598 filed on Mar. 26, 1999, Application No. U.S. 60/171,504 filed on Dec. 22, 1999, Application No. U.S. 60/126,596 filed on Mar. 26, 1999, Application No. U.S. 60/171,552 filed on Dec. 22, 1999, Application No. U.S. 60/126,600 filed on Mar. 26, 1999, Application No. U.S. 60/171,550 filed on Dec. 22, 1999, Application No. U.S. 60/126,501 filed on Mar. 26, 1999, Application No. U.S. 60/171,551 filed on Dec. 22, 1999, Application No. U.S. 60/126,504 filed on Mar. 26, 1999, Application No. U.S. 60/174,847 filed on Jan. 7, 2000, Application No. U.S. 60/126,509 filed on Mar. 26, 1999, Application No. U.S. 60/174,853 filed on Jan. 7, 2000, Application No. U.S. 60/126,506 filed on Mar. 26, 1999, Application No. U.S. 60/174,852 filed on Jan. 7, 2000, Application No. U.S. 60/242,710 filed on Oct. 10, 2000, Application No. U.S. 60/126,510 filed on Mar. 26, 1999, Application No. U.S. 60/174,850 filed on Jan. 7, 2000, Application No. U.S. 60/138,573 filed on Jun. 11, 1999, Application No. U.S. 60/174,851 filed on Jan. 7, 2000, Application No. U.S. 60/126,508 filed on Mar. 26, 1999, Application No. U.S. 60/174,871 filed on Jan. 7, 2000, Application No. U.S. 60/126,507 filed on Mar. 26, 1999, Application No. U.S. 60/174,872 filed on Jan. 7, 2000, Application No. U.S. 60/126,597 filed on Mar. 26, 1999, Application No. U.S. 60/174,877 filed on Jan. 7, 2000, Application No. U.S. 60/126,601 filed on Mar. 26, 1999, Application No. U.S. 60/154,373 filed on Sep. 17, 1999, Application No. U.S. 60/176,064 filed on Jan. 14, 2000, Application No. U.S. 60/126,602 filed on Mar. 26, 1999, Application No. U.S. 60/176,063 filed on Jan. 14, 2000, Application No. U.S. 60/128,695 filed on Apr. 9, 1999, Application No. U.S. 60/176,052 filed on Jan. 14, 2000, Application No. U.S. 60/128,696 filed on Apr. 9, 1999, Application No. U.S. 60/176,069 filed on Jan. 14, 2000, Application No. U.S. 60/128,703 filed on Apr. 9, 1999, Application No. U.S. 60/176,068 filed on Jan. 14, 2000, Application No. U.S. 60/128,697 filed on Apr. 9, 1999, Application No. U.S. 60/176,929 filed on Jan. 20, 2000, Application No. U.S. 60/128,698 filed on Apr. 9, 1999, Application No. U.S. 60/176,926 filed on Jan. 20, 2000, Application No. U.S. 60/128,699 filed on Apr. 9, 1999, Application No. U.S. 60/177,050 filed on Jan. 20, 2000, Application No. U.S. 60/128,701 filed on Apr. 9, 1999, Application No. U.S. 60/177,166 filed on Jan. 20, 2000, Application No. U.S. 60/128,700 filed on Apr. 9, 1999, Application No. U.S. 60/176,930 filed on Jan. 20, 2000, Application No. U.S. 60/128,694 filed on Apr. 9, 1999, Application No. U.S. 60/176,931 filed on Jan. 20, 2000, Application No. U.S. 60/128,702 filed on Apr. 9, 1999, Application No. U.S. 60/177,049 filed on Jan. 20, 2000, Application No. U.S. 60/138,629 filed on Jun. 11, 1999, Application No. U.S. 60/138,628 filed on Jun. 11, 1999, Application No. U.S. 60/138,631 filed on Jun. 11, 1999, Application No. U.S. 60/138,632 filed on Jun. 11, 1999, Application No. U.S. 60/138,599 filed on Jun. 11, 1999, Application No. U.S. 60/138,572 filed on Jun. 11, 1999, Application No. U.S. 60/138,625 filed on Jun. 11, 1999, Application No. U.S. 60/138,633 filed on Jun. 11, 1999, Application No. U.S. 60/138,630 filed on Jun. 11, 1999, Application No. U.S. 60/138,627 filed on Jun. 11, 1999, Application No. U.S. 60/155,808 filed on Sep. 27, 1999, Application No. U.S. 60/155,804 filed on Sep. 27, 1999, Application No. U.S. 60/155,807 filed on Sep. 27, 1999, Application No. U.S. 60/155,805 filed on Sep. 27, 1999, Application No. U.S. 60/155,806 filed on Sep. 27, 1999, Application No. U.S. 60/201,194 filed on May 2, 2000, Application No. U.S. 60/212,142 filed on Jun. 16, 2000, application Ser. No. 10/105,299 filed on Mar. 26, 2002, Application No. PCT/US02/09105 filed Mar. 26, 2002, Application No. PCT/US02/09188 filed Mar. 26, 2002, Application No. PCT/US02/09239 filed Mar. 26, 2002, Application No. PCT/US02/09370 filed Mar. 26, 2002, Application No. PCT/US02/09922 filed Mar. 26, 2002, Application No. PCT/US02/09135 filed Mar. 26, 2002, and Application No. PCT/US02/09257 filed Mar. 26, 2002.

[image]

LENGTHY TABLE
The patent application contains a lengthy table section. A copy of the table is available in electronic form from the USPTO web site (http://seqdata.uspto.gov/?pageRequest=docDetail&DocID=US20070015162A1) An electronic copy of the table will also be available from the USPTO upon request and payment of the fee set forth in 37 CFR 1.19(b)(3).

What is claimed is:

1. An isolated nucleic acid molecule comprising a first polynucleotide sequence at least 95% identical to a second polynucleotide sequence selected from the group consisting of:
(a) a polynucleotide fragment of SEQ ID NO:X as referenced in Table 1A;
(b) a polynucleotide encoding a full length polypeptide of SEQ ID NO:Y or a full length polypeptide encoded by the cDNA Clone ID in ATCC Deposit No: Z corresponding to SEQ ID NO:Y as referenced in Table 1A;
(c) a polynucleotide encoding a polypeptide fragment of SEQ ID NO:Y or a polypeptide fragment encoded by the cDNA Clone ID in ATCC Deposit No: Z corresponding to SEQ ID NO:Y as referenced in Table 1A;
(d) a polynucleotide encoding a polypeptide fragment of SEQ ID NO:Y or a polypeptide fragment encoded by the cDNA Clone ID in ATCC Deposit No: Z corresponding to SEQ ID NO:Y as referenced in Table 1A, wherein said fragment has biological activity;
(e) a polynucleotide encoding a polypeptide domain of SEQ ID NO:Y as referenced in Table 1B;
(f) a polynucleotide encoding a polypeptide domain of SEQ ID NO:Y as referenced in Table 2;
(g) a polynucleotide encoding a predicted epitope of SEQ ID NO:Y as referenced in Table 1B; and
(h) a polynucleotide capable of hybridizing under stringent conditions to any one of the polynucleotides specified in (a)-(g), wherein said polynucleotide does not hybridize under stringent conditions to a nucleic acid molecule having a nucleotide sequence of only A residues or of only T residues.

2. The isolated nucleic acid molecule of claim 1, wherein the polynucleotide fragment comprises a nucleotide sequence encoding a secreted form of SEQ ID NO:Y or a secreted form of the polypeptide encoded by the cDNA Clone ID in ATCC Deposit No: Z corresponding to SEQ ID NO:Y, as referenced in Table 1A.

3. The isolated nucleic acid molecule of claim 1, wherein the polynucleotide fragment comprises a nucleotide sequence encoding the sequence identified as SEQ ID NO:Y or the polypeptide encoded by the cDNA sequence included in ATCC Deposit No: Z, which is hybridizable to SEQ ID NO:X, as referenced in Table 1A.

4. The isolated nucleic acid molecule of claim 1, wherein the polynucleotide fragment comprises the entire nucleotide sequence of SEQ ID NO:X or the cDNA sequence included in ATCC Deposit No: Z, which is hybridizable to SEQ ID NO:X, as referenced in Table 1A.

5. The isolated nucleic acid molecule of claim 2, wherein the nucleotide sequence comprises sequential nucleotide deletions from either the C-terminus or the N-terminus.

6. The isolated nucleic acid molecule of claim 3, wherein the nucleotide sequence comprises sequential nucleotide deletions from either the C-terminus or the N-terminus.

7. A recombinant vector comprising the isolated nucleic acid molecule of claim 1.

8. A method of making a recombinant host cell comprising the isolated nucleic acid molecule of claim 1.

9. A recombinant host cell produced by the method of claim 8.

10. The recombinant host cell of claim 9 comprising vector sequences.

11. A polypeptide comprising a first amino acid sequence at least 95% identical to a second amino acid sequence selected from the group consisting of:
(a) a full length polypeptide of SEQ ID NO:Y or a full length polypeptide encoded by the cDNA Clone ID in ATCC Deposit No: Z corresponding to SEQ ID NO:Y as referenced in Table 1A;
(b) a secreted form of SEQ ID NO:Y or a secreted form of the polypeptide encoded by the cDNA Clone ID in ATCC Deposit No: Z corresponding to SEQ ID NO:Y as referenced in Table 1A;
(c) a polypeptide fragment of SEQ ID NO:Y or a polypeptide fragment encoded by the cDNA Clone ID in ATCC Deposit No: Z corresponding to SEQ ID NO:Y as referenced in Table 1A;
(d) a polypeptide fragment of SEQ ID NO:Y or a polypeptide fragment encoded by the cDNA Clone ID in ATCC Deposit No: Z corresponding to SEQ ID NO:Y as referenced in Table 1A, wherein said fragment has biological activity;
(e) a polypeptide domain of SEQ ID NO:Y as referenced in Table 1B;
(f) a polypeptide domain of SEQ ID NO:Y as referenced in Table 2; and
(g) a predicted epitope of SEQ ID NO:Y as referenced in Table 1B.

12. The polypeptide of claim 11, wherein said polypeptide comprises a heterologous amino acid sequence.

13. The isolated polypeptide of claim 11, wherein the secreted form or the full length protein comprises sequential amino acid deletions from either the C-terminus or the N-terminus.

14. An isolated antibody that binds specifically to the isolated polypeptide of claim 11.

15. A recombinant host cell that expresses the isolated polypeptide of claim 11.

16. A method of making an isolated polypeptide comprising:
(a) culturing the recombinant host cell of claim 15 under conditions such that said polypeptide is expressed; and
(b) recovering said polypeptide.

17. The polypeptide produced by claim 16.

18. A method for preventing, treating, or ameliorating allergic or asthmatic disorders, comprising administering to a mammalian subject a therapeutically effective amount of the polypeptide of claim 11.

19. A method of diagnosing allergic or asthmatic disorders in a subject comprising:
(a) determining the presence or absence of a mutation in the polynucleotide of claim 11; and
(b) diagnosing the allergic or asthmatic disorders based on the presence or absence of said mutation.

20. A method of diagnosing allergic or asthmatic disorders in a subject comprising:
(a) determining the presence or amount of expression of the polypeptide of claim 11 in a biological sample; and
(b) diagnosing the allergic or asthmatic disorders based on the presence or amount of expression of the polypeptide.

21. A method for identifying a binding partner to the polypeptide of claim 11 comprising:
(a) contacting the polypeptide of claim 43 with a binding partner; and
(b) determining whether the binding partner effects an activity of the polypeptide.

22. The gene corresponding to the cDNA sequence of SEQ ID NO:X.

23. A method of identifying an activity in a biological assay, wherein the method comprises:
(a) expressing SEQ ID NO:X in a cell;
(b) isolating the supernatant;
(c) detecting an activity in a biological assay; and
(d) identifying the protein in the supernatant having the activity.

24. The product produced by the method of claim 20.

The application's sequence listing, which the Patent Office published only in electronic form, follows.

SEQUENCE LISTING (384 sequences)

SEQ ID NO: 1 - DNA, 733 bp, Homo sapiens
gggatccggagcccaaatcttctgacaaaactcacacatgcccaccgtgcccagcacctgaattcgagggtgcaccgtcagtcttcctcttccccccaaaacccaaggacaccctcatgatctcccggactcctgaggtcacatgcgtggtggtggacgtaagccacgaagaccctgaggtcaagttcaactggtacgtggacggcgtggaggtgcataatgccaagacaaagccgcgggaggagcagtacaacagcacgtaccgtgtggtcagcgtcctcaccgtcctgcaccaggactggctgaatggcaaggagtacaagtgcaaggtctccaacaaagccctcccaacccccatcgagaaaaccatctccaaagccaaagggcagccccgagaaccacaggtgtacaccctgcccccatcccgggatgagctgaccaagaaccaggtcagcctgacctgcctggtcaaaggcttctatccaagcgacatcgccgtggagtgggagagcaatgggcagccggagaacaactacaagaccacgcctcccgtgctggactccgacggctccttcttcctctacagcaagctcaccgtggacaagagcaggtggcagcaggggaacgtcttctcatgctccgtgatgcatgaggctctgcacaaccactacacgcagaagagcctctccctgtctccgggtaaatgagtgcgacggccgcgactctagaggat

SEQ ID NO: 2 - protein, 5 aa, Homo sapiens
  Site (3): Xaa equals any of the twenty naturally ocurring L-amino acids
WSXWS

SEQ ID NO: 3 - DNA, 86 bp, Artificial Sequence
  Primer_Bind: Synthetic sequence with 4 tandem copies of the GAS binding site found in the IRF1 promoter (Rothman et al., Immunity 1:457-468 (1994)), 18 nucleotides complementary to the SV40 early promoter, and a Xho I restriction site.
gcgcctcgagatttccccgaaatctagatttccccgaaatgatttccccgaaatgatttccccgaaatatctgccatctcaattag

SEQ ID NO: 4 - DNA, 27 bp, Artificial Sequence
  Primer_Bind: Synthetic sequence complementary to the SV40 promoter; includes a Hind III restriction site.
gcggcaagctttttgcaaagcctaggc

SEQ ID NO: 5 - DNA, 271 bp, Artificial Sequence
  Protein_Bind: Synthetic promoter for use in biological assays; includes GAS binding sites found in the IRF1 promoter (Rothman et al., Immunity 1:457-468 (1994)).
ctcgagatttccccgaaatctagatttccccgaaatgatttccccgaaatgatttccccgaaatatctgccatctcaattagtcagcaaccatagtcccgcccctaactccgcccatcccgcccctaactccgcccagttccgcccattctccgccccatggctgactaattttttttatttatgcagaggccgaggccgcctcggcctctgagctattccagaagtagtgaggaggcttttttggaggcctaggcttttgcaaaaagctt

SEQ ID NO: 6 - DNA, 32 bp, Artificial Sequence
  Primer_Bind: Synthetic primer complementary to human genomic EGR-1 promoter sequence (Sakamoto et al., Oncogene 6:867-871 (1991)); includes a Xho I restriction site.
gcgctcgagggatgacagcgatagaaccccgg

SEQ ID NO: 7 - DNA, 31 bp, Artificial Sequence
  Primer_Bind: Synthetic primer complementary to human genomic EGR-1 promoter sequence (Sakamoto et al., Oncogene 6:867-871 (1991)); includes a Hind III restriction site.
gcgaagcttcgcgactccccggatccgcctc

SEQ ID NO: 8 - DNA, 12 bp, Homo sapiens
ggggactttccc

SEQ ID NO: 9 - DNA, 73 bp, Artificial Sequence
  Primer_Bind: Synthetic primer with 4 tandem copies of the NF-KB binding site (GGGGACTTTCCC), 18 nucleotides complementary to the 5' end of the SV40 early promoter sequence, and a XhoI restriction site.
gcggcctcgaggggactttcccggggactttccggggactttccgggactttccatcctgccatctcaattag

SEQ ID NO: 10 - DNA, 256 bp, Artificial Sequence
  Protein_Bind: Synthetic promoter for use in biological assays; includes NF-KB binding sites.
ctcgaggggactttcccggggactttccggggactttccgggactttccatctgccatctcaattagtcagcaaccatagtcccgcccctaactccgcccatcccgcccctaactccgcccagttccgcccattctccgccccatggctgactaattttttttatttatgcagaggccgaggccgcctcggcctctgagctattccagaagtagtgaggaggcttttttggaggcctaggcttttgcaaaaagctt

SEQ ID NO: 11 - DNA, 841 bp, Homo sapiens
  misc_feature (23)..(23): n equals a,t,g, or c
  misc_feature (45)..(45): n equals a,t,g, or c
  misc_feature (69)..(69): n equals a,t,g, or c
  misc_feature (84)..(84): n equals a,t,g, or c
  misc_feature (762)..(762): n equals a,t,g, or c
  misc_feature (767)..(767): n equals a,t,g, or c
  misc_feature (782)..(782): n equals a,t,g, or c
  misc_feature (789)..(789): n equals a,t,g, or c
atttttgggaatttggcggttanatttacccggaacggttttccnttgttccgcaagtcgaattacctncctaagggaacaaangtggagttcaccgggttgcggccggttttaaactagtggacccccggggctgcaggaattcggcacgagatcctgacccaagctcaggcacacccaaggcacctgcctctctgagtcttgggtctcagttcctaatatcccgctccttgctgagaccatctcctggggcagggtccttttcttcccaggtcctcagcgctgcctctgctggtgccttctcccccactactactggagcgtgcccttgctggggacgtggctgtgccctcagttgcccccagggctgggtgcccaccatgccccttcctctttctcctcctacctctgccctgtgagcccatccataaggctctcagatgggacattgtgggaaaggctttggccatggtctgggggcagagaacaaggggggagacacaagtagacctcaggtagaacgacactgggcggagccaccccagggcctgctcccagggagtgctcgaggcgcatcaggcccgttttttaccagtttatatcacggtcttcatttttaaaagtaacgctaactttgtagggacgatgtctcatggattaaataatattctttatggcagtaaaaaaaaaaaaaaaaaaaaaaaaaaaaaaaaaaaaactcgagggggggcccggtacccaatkcgccctrkagkgmktcgnattanaattcactggccgtngttttanaaattcgtgaatggggaaaaccctggggttacccaacttaaacgccttgcag

SEQ ID NO: 12 - DNA, 667 bp, Homo sapiens
aattcccgggtcgacccacgcgtccgcgcagtccgaggcacgcagtccgaggcacgcacaggagtcccacagcactgcgtgtgtcggcgggacgcaggcacacgtgggtgtgtgtgcatgtgtgtttgtgtgagggcagcgtgtcctccagtgtgcatggtgtgtgggcttgggccccatccctggcccgagcatttcatcctgtgggggaggggtgctgacctagtgggaggagccccactgtgatccatgagctgccctgcccacgcctcccctccctgtagcaacacctctgggtgtttggagtttagcttttgtgggtttgctctccctatcccatctcctgtactacacagttcatggcagggtggggaggggtggggttggttcgggtgggtgaggggctttttcctctgcgtgcgatgttgttatctgacagttctccgtccctactggcctttctcctcgtcttcatatttgtacggtacaagcaataaagacactcatttcagaccaggaaaaaaaaaaaaaaaaaaaaaaaaaaaaaagaaaaaaaaaaaaaaaaaaaaaaaaaaaaaaaaaaaaaaaaaaaaaaaaaaaaaaaaaaaaaaaaaaaaaaaaaaaaaaaaaaaaaaaaaaaaaaaaaaaaaaaaaaaaaaaaaaaaaa

SEQ ID NO: 13 - DNA, 2318 bp, Homo sapiens
ccacgcgtccgcccaaagttctggggtgacaggcgtgagtcactgtgcctggccacttcctggttcttagatgctgtctttttccctgtgtcctcccatagtaaaggggcagacaagctcccctgggtgtcttataaaggcactgatgtcactcacaaggcttctatgcccaataactaatcacctcccaaaagcctcctaataaaaccactttgggggttaggatttcaacataggaattttggggagggacacgaacatttagtccttaacagtgatgtatttatttcccatgttgtaaaggattgggcatggcttattttttgtcacatttgttccttattacatgctaatgatgggaaccctggtgttgatattactacatgatgttattgtcacatttactgagttttataatgctcagaatttaaaatggtgattaatatttttgcaggtaattcatgaatattgtactttttttctgaacccttattcagaaaaggggctctgccaagtggaaaaaaattatttttcatcattaaattttgaggtagtacttttgtgaatgtatggttttaataagtaggactatagacatacagcccccctttttttaacctttacagctggtaggtattttcctattttggttaatattggctttgttgcttgattatagcacactgctttgccgtgtttaactttgagggtgtgttgtgttgttgaacagaaactgaccttttcagatatttcttctttggtgaagatcagacagttgaagttgaagtattcttcccatcaaattatcctgagggaggactacagagccagtttagtgaggattaaaaaggaaaaaaaaaataggtgaacctttgtaaatgccatcctggactctgccaactgcttttccggggaatactgtggtggtctgtggccttgtcacaatcagggatattggtgaaaggcattccctgaactgggggccgacagcaggctgacttttgagcagtcctgccaccactttgattttttatcttcttcctgtgccatgacttttatgcattgtttatccagctccaaccagggggagacccactcgaaagggtcctccagaatgaatggagactttccatgaggagtccctgtcatgacagtgacctggtgtgtgcaagctctccccacttactgatggctggaaggcagtagtgcctgcaggtttgcccttgccgaacagtatgatgtcagtgtgaatcgggaccaggcctcatccaggctttaatcttttttttttttttttttttttttgagactgagcctgggtgacagagtgagactccatctcaaaaaaaaaaaaaaaaaaaaaaagtaaatagctttattgagatagaaatcgagtcacacacttgtgtatccatcaccacaatcaatttcagaatattttcagcaccccaagggaagaagcctttagcgatcgcaatccctccctattctctccttccccaacccccggcaaccactactgtattggactctctgtctccatgggttcacctattccggatatttcatatgagtggaatcatacaacatgtgttcatttcttatccggcttctttcactgaggatgttttcaaggatcatccatgttgcagcacgtgtcggttctttttatggccaaataatatttcattgtatggctagaccacattttcctgattgatgcatcagctgatagacatttgaactggttccaccttttggctagtatgaagaatgctgctgtgaacagtcaggcacacatttttgtgtggccatcggttttcgcttatcttggttctataactagtggtgaaattgctcagtcccatgggaattctgtttgttgagtggacaaggattccacttgtttctaggatttggagtgtgaggaaattgggagaaaaggcacattgttaaaaggtacataaatgtgttctgtgaaggagggctttgttgagctaggtcctaatgataactgctttccattactattttttctttattttctttttagaaggaagagattgttgtgactctcttaccagctggtcactgtccgggatcagttatgtaagggggtcatttattttgtcattttattatatgtagacacatattgtatttgtagaaataaatttttagggtctaaaattaatagggggctgggtgcagtggcacatgtctgtaatcccagtgctttgggaggctgacgcgggaggattgcttgagcttgggagttggaggctgcagtgagtttttttttaaaaaaaaaaaaaaaa

SEQ ID NO: 14 - DNA, 1913 bp, Homo sapiens
  misc_feature (12)..(12): n equals a,t,g, or c
  misc_feature (14)..(14): n equals a,t,g, or c
  misc_feature (398)..(398): n equals a,t,g, or c
ctcgcaagagantntttgtgtttctaatacaggatctggaagtagtgctttctaatcctcatttcctgtaggatgttcctgcactataacaagattatgttttcttccttctgcagcagctttctgcttcttgggtactactagctattgttcaattcaggtgaggcctgtgatgacatatatgtagcatgtgctctgcgctccctgcaagctgagcagatacaaccaatgcatcactgtatactcttgctgagaatgtggatgcagcctcacagatctttgcaacactccaaccagccaggaccagttgatcagaactgatcttattggtctgataaccaatcttatttgtgaactgattcatatctgtctttccactcttggttctcttgccgtangaacaaaaacagtttaggaagcataattacgaacatttaggaaccaatatgtataagtaattcggagactccaattcacctgcccctcccccatcccaggttgtggaggctcgaggaagctgacttcttaggctaaaggacaaaaaaatctctttacctccttggccattttcatgttctctgccaattactataggcagtcttcattttgcagaggtgaggtaagacttcatcttattcttcatgtaatcccaccttctaacaaaaaataaataaatatttaaattccaaggagaagtgttctttgtgtatttctagcagaaaacagatgcttaagcctaagaaggaagatccgtccatgacaaaggaaagtggaaaactgaaccagttatctgaatacttcatgccaggacagttgctattagcaactgttttgcaccttcagggctttaaaatgggctctgcagacagcatttgcatatgcaagactcagtagccaagcctccactgccaattgttgaaggcagtttcagatcgccaccttttgaggtacatttctttaagcacaagagaagtagaaatggcctttgccttgtctccagtggtttgtccctctggtgcctcagcagataccagagcttattcttatgaccatttggaagtagtcctcaaagtaaagatcaagaaaaaattggattctttttccattttctcataatagtagcctagtcaacacaagactcccataaaatatgactcactattgggagccatactattttataagcttacttcctgctgacaaaactagctttcctcaaggaaatataaaggaggggaaagtcacatagtgttaggaaaacattcctgtgttttgaatacgatgaatccataggatagagaaaaatctgcttgttctattctgagagttctctgagatatcccttcactctgcttggcatttggccattgatattcaacaggtcactgaccaagcttttctaaatttttcagagagagttacttaccaataaggtctgttcttaaacctacctagttgattttcatatctttccataaagtgtcatgattctatcatagaccctgacttaacattgtaaggactatgagtcctcccattttttaattaatttttttttagcaaattaggacttcggcaggttttcctctcctaaactcattctttcctccacaggattgctttgtccatctcctgctttcatttcaagtgcataaacaaaacctcaaagggcctgggaaggtgaggcaggccagagtctgtgttctgtgttgagtgtcaagctatttgttaagaaggtctgcaacaggcctttggtgtggctctgccagagactgttctgaacactttgcttgagatccgtgccctgtaaaatggatatgatgttttactgatgtctgtaatacatttgtaaacttccaataaaatttgaataaaaaaaaaaaaaaaaaaaaaaaaaaaaaaaaaaactcgag

SEQ ID NO: 15 - DNA, 330 bp, Homo sapiens
ggcacgagccagcaccagcgtcctagatggccccagcaccagctccaccatccggaccagaaatgctgccagagctggcgccagcttcttctcctggatccagcaccgttgacgaactgcagcgatcttactggccaagccagagcgcctcctctcagattccttctcgacacagcaccctaggcggcttcttcctgtcagtcggaggtggcatgcaagatgaagctctctttgctcttcctgctttcattttgtgcttttccttgtgttttcatgttttgggtatcagtgttacattaaagttgcaaaattaaaaaaaaaaaaaaaaaa

SEQ ID NO: 16 - DNA, 743 bp, Homo sapiens
gattggtcagatttgccttttttcagaatctgaagtcattccgtactgtatgtacacatttgtgtctggcttggctccagataaagtttttgggattcatgaatgttgttgcacgtattaggagagactcctttgtattgctgagtagtattcccctctgtggttagaccatgatttatttatccatctacctgttggtgaacattttggctgtttctaattcttggccatcatgaataaaactgctgtgaatgttcctacaataataattgtctaaacatatgtttttatttcttttgtgtcttagtccgtcgggctgctataactaagaaccacagcctgggtggcttataaacaacagaaatttatttttcatggttctggaggctgggaagtccaagatcaaggtgccagtggattcagtgtctgttgagggcccatgtcttgattcatagatggcggtcttcttgctgtgttctcctagacatggcagaaggggcaagggagctctctggggtctcttttataagggcaccaatcccattcatgcaggctctgccctcatgacctaatcacctccgaggaggcccaaaggccctacctccaagtaccatcatatgagggattaggtttcaaggtatgaacctggggaggacataaacagtcagtctagctttttgggtaaatgaattgctgggcttaataataaatgtatatttaactgtaaaaaaaaaaaaaaaaaa

SEQ ID NO: 17 - DNA, 1592 bp, Homo sapiens
  misc_feature (5)..(5): n equals a,t,g, or c
  misc_feature (805)..(805): n equals a,t,g, or c
  misc_feature (857)..(857): n equals a,t,g, or c
  misc_feature (1587)..(1589): n equals a,t,g, or c
ccccnataacaatgcataagttatagattacataccattcagtgtagcatgatgaaatctcttgccaatctgttccatccacctgggatgtgaatcatccctctctctggtgtattcayactgtatgtgctagccgtctctgttacgagatcagctgtcgtggaatcagtgctagtgttcaggtaactcttatttaataattgcctcaaagtgcattgtgctgtgcctaatttataaaataaacggtatcataggtatgtatgtatacgaaaaacatagtatatgcagggttgggtactatccacagtttcaggcatctactggggggtcttggaatatatccccagaggtaaggggtgactactgtatacagccatgccaacatgctggttctcagagagttataagagagattaaaaatacatgcagctgtttgggcactttcttcccaaataaaatacccagtaaaatgtaacatactacctatagcttgataatctatctgaggatgtttatgatgtctgtctatatactttaatttggccttagcttctttgtaggtatcaagttatcacttgcaaatttattttcaaaaagcatagtttcttgtacattttagaagattagtttttcttattttgggacacctacaccaatgttttaaatgtggataaattttaatgtggaatttcttttaaaaataatcctcttcatagagcaatacaacaaaaatgtgttgtatcttggagatttacattataaatgtagtaacatttatgagcttaaatttaatgaaacctttttntttttttgagacagtcttgcactgtcgcccaggctagagtgcagggcatganctcagctcactgcaacctccgtctcccgggttcaagcaattctcgtgcctcagcctcctcagtaactggcattataggtgtgcaccaccacacctggctaatttwrgtatttwtcataaagacgggggtttcaccatgttggccaggctggtctcaaactcctgacctcaggtgatcagcctccctcggsctcccaaagtgctgggattacaggcatgagccatggtgcctggccaaacgtttttattacaaatattacattaaactaaagctcacaactgttactatgcatcaggaattaacagtcatttctcatttgtgttatycyccwattkgatamcatatagtgactatctctttatgggttaaatatcagtttcttggccagaattcaagatctgcccctaactaatcctacttctcccagtacccttacagcactcctaccctactagtaactctgatatctcatagtcctcagatttatcaagcaaacgaaactgaatgagcactactataaggtaccacaaactacaaaaggagacagttttgcccttgttgctttcagttaaattattgtgctattttttgcttaatttctaggttttttttgcgtgtttatcatgtctccgtaggtaaagtggccagaaatctttttctactttacatttcctgtaagtgctgtttgtttgaataaagttaatgtgtgaggttaaaaaaaaaaaaaagnnnaga

SEQ ID NO: 18 - DNA, 2440 bp, Homo sapiens
tacggctgcgagacgacagaaggggccttctagcagaaatggcggctgcggcggctcgagtggtgttgtcatccgcggcgcgcggcggctctggggtttcagcgagagtcttctaatccgaggcgctgcgggacggtcattatattttggagagaacagattaagaagtacacaggctgctacccaagttgttctgaatgttcctgaaacaagagtaacatgtttagaaagtggactcagagtagcttcggaagactctgggctctcaacatgcacagttggactctggattgatgctggaagtagatacgaaaatgagaagaacaatggaacagcacactttctggagcatatggctttcaagggcaccaagaagagatcccagttagatctggaacttgagattgaaaatatgggtgctcatctcaatgcctatacctccagagagcagactgtatactatgccaaagcattctctaaagacttgccaagagctgtagaaattcttgctgatataatacaaaacagcacattgggagaagcagagattgaacgtgagcgtggagtaatccttagagagatgcaggaagttgaaaccaatttacaagaagttgtttttgattatcttcatgccacagcttatcaaaatactgcacttggacggacaattttgggaccaactgaaaatatcaaatctataagtcgtaaggacttagtggattatataaccacacattataaggggccaagaatagtgcttgctgctgctggaggtgtttcccatgatgaattgcttgacttagcaaagtttcatttcggtgactctttatgcacacacaaaggagaaataccagctctgcctccctgcaaattcacaggaagtgagattcgtgtgagggatgacaagatgcctttggcgcaccttgcaatagctgttgaagctgttggttgggcacatccagatacaatctgtctcatggttgcaaacacgctgattggcaactgggatcgctcttttgggggaggaatgaatttatctagcaagctggcccagctcacttgtcatggcaatctttgccatagctttcagtctttcaacacttcctacacagatacaggattatggggactgtatatggtttgtgaatcatccactgttgcagacatgctacatgttgttcaaaaagaatggatgcgactctgtacaagtgtcacagaaagtgaggttgcacgagccagaaatcttctgaaaacaaacatgttgttgcagcttgatggttcaactccaatttgtgaagatattggtaggcaaatgttatgctataatagaaggattcccatccctgagcttgaagcaagaattgatgctgtgaatgctgagmcaattcgagaagtatgtaccaaatacatttataataggagtccagctattgctgctgttggattctttcttcttaggatataatcacagaagtgaacttcatgaatggaaatggaacaagttattttccaaaaggcaaactatttcatactcctacgtgaacatccttttaccacagcctcagccacagtacgtctaattatttaaaatttgtgattatcgctggtggtcaacaatttttttgtttttcatcctttaactggaaaaaggaggggctgtctcagtttttcttctgactctgtgtgtcacttacaattaataatgctagctgttaacatctacatagcagttgacatgtgccaggcctgtttaccagttaatcttctccatgatcctatgaggaaagtgctattgctgtctccatttcatagatgaggaaaatgaggcacagaggagacgttatgtagccactaccactgcaacttgctcaaacttccggccaagtcggctctagtccagacagcctgactcctcagcctgcgtctgtatgctgcctctcctaattcattatgtttattaataatttttccccgttttgttaacacttatgtttcaaaaacagtcatctttatttacattgactgatcatttcttttgtaatttcttctagtacttacaatagttctagtttcattaacatttcctatagactgaaaaaattttttaatctttttggaattttaatatagtcaagaaagtatctaaacttctcatttttcaaaatcttactgtcatttaataatccttcccttttccactgawwwgtgacactataatagtaaattttacaagggcttgttttggttacttattcttgccctggggttatctttaaactgaccacagytttctaatatatttgatcgtaacttccaaaaactgtgtaatttttgcttatttgtcttgcatctagtcacttaactctcttttgcttttctaggcagatcctatattatctacaaataatatatttatttccttctttccaaaaaaaaaaaa

SEQ ID NO: 19 - DNA, 1142 bp, Homo sapiens
gaggcaataggtcggggaaggtgatgaatgttctgtggggcatgtcaaattgggtggaacctctggggccttctgtgggaratgcccagggagcacagatttaggagatgggagcaactagtgtgatggtggtgagggctggttgaaaccctggggagtatgtggagctcatctgtgtttccacagagcttatctcccaggagatagccatcgggagtgccttgcctggcatgttcccctgctgaggtctgttacccaggagcctgcagacacaaagagcaggctggtaatgctgagaagcgaacattcagtacctgtcaccagaacccagcatgggtgttcaacactatctggtgactctgtgagaagaccctatgctcaggggatgaagtgtgttgcttgtgcaagagggatggagagagagtgttttccaagtatatgtgtgtgtgcatgtgtgtgtacccaggtggaaccctcctgcatgctcacatatgcctttatgaatactggaatctctaaacctaccatcatgcatctcgtcttagcttcctacctctctctttctacccctgcaacagccatgttattgccagtaacacatgagaagagtgagggagacctgtctgtagacaagctcagtgtgctgctaaggaagcaggcagcagttctgtcctcatgcgttcccattgtgccctgtcctgggatggcaaatgcaaggccagacaggctctgggstctctggtctgaccactaatagcatcttctcctcccgctaggctgaccagcctccaaggcaggactctgacaccagggttataaatgcatctgtctgggcacattatctaaattgttatgtatcaccctgggtaatggcaaaagtaaaaaccgctgttagctcagtgaataaatccttggtgctgatcaatcattgcacgacatagactcttttaataggcacaatttacacagaggcttggcagactgcttcgtcttctaattgctgatggaaaatggatgccgagctctgctgtgccgtaaaaatgtaaactataaatgacttaaaaacttgtgtgctcccttctccacccagcactcattttaaccttttatttagaaacaaaaaaaaaaaaaaaaaactcgag

SEQ ID NO: 20 - DNA, 607 bp, Homo sapiens
ggcacgagtgggcctggaattcgccacaggacggatcttacagaggcaagtggtccctggacctctcttgcatccattctctagacggccgtgtcagaggctccaccctgttgtgaacttggtatggaggcaaaggcttagaggctggaccagcattcttgggcaaggactgactctcgaagggttttgttcttggctttggacacctgagaaccccctcctcccctcccccaatacaaggtttttgacatgagtgtactcctgcttagttcctcttgtggggctgcatttgcggtgctttgccctccccactgtgagtgaggggccaagggatctcctcaatcctgtctccccagcggctctgtttcctccttctttccttggcctctgtcctttgctgacttcctcttccttacccagcagaactcaccctggggtcggggcagtggggaggggcctatccactgctcttcctagtccttggcagctggcctaggtgggcagactataggagggactggttaggagtctgcattgctttgacttccctctccttggttaataaacacaaatgcttgtttctcaaaaaaaaaaaaaaaaaaaaaaa

SEQ ID NO: 21 - DNA, 1048 bp, Homo sapiens
gccgtcctgcaggtggttgccatcgcggccttcaccaggtagctacggacacccgggaataccccacactggggccctcctcctgggcctgaccagtcccccagctgtcacctccccattcctggacaggaagggcacttttcctagtgaactggccatagatggttttggatggttccatctgttctggcaggagtgggagcaggagccagggcagaacaaactgctggaggccctggtgttgggaacagctgcggggagggtagggaccagacagaactgccttcaagatgagtcccaggagcgcacactcagccctgtcagtggggtctggctttagcagccaggcctccacagacccccatgggcccccagggccgagagggaggacagagcccttcagaacagaggcctcatctcactgcatcccccatcaccccctagttccccaatggtcctaatttgtgttctgagatcccagtttactccgtggccaggccccacctgtgtttccaagtcgggctggagacgcaggatggggtaggccttgtgctctgagcaaccccagctctgcctcacaggcaggcaggcccggtgcaagagtggactctgggttcctaaagcaataaatgcaaacaagccaacagctctgctgcctagcaatttccatcttagccacacttctcccttcaggggcttcggaggagaggtcagggctaaggccggggatgagactgcaggagagagagcagcggagggccacattcggagcctccgtccactccagttttatcagcttttgccttttgcacggagtgctaaacaaattctagctctgtgtttttttcccattcccagatttactatcagttctccttaaaaagtatctaagctgttacagtagctttcccttcacttgattctattgtgtgttttctatgtttggaataattacacccaaatatctagatattttctcttcaccgcattttgtaaataaagagatgtgtatgccwmmmwraaaaaaaaaaaaaaaaagggcggccgc

SEQ ID NO: 22 - DNA, 596 bp, Homo sapiens
  misc_feature (564)..(564): n equals a,t,g, or c
  misc_feature (569)..(569): n equals a,t,g, or c
  misc_feature (571)..(571): n equals a,t,g, or c
  misc_feature (578)..(578): n equals a,t,g, or c
  misc_feature (580)..(580): n equals a,t,g, or c
cagctatgacccatgattacgccaagctcgaaattaaccctcactaaagggaacaaaagctggagctccaccgcggtggcggccgctctagaactagtggatcccccgggctgcaggaattcggcacgagaattggggaaaagggtattcaatatttattaagtaacaatgagaaatgcaacaaacttccttatttatgccttatgaataaaagagtgtggaatgtaaggtgaaattttatgtgcaagatcctgaaggaatgggtattcttgaaggcagggactgtcttttctatgtttgttctgtacagctctcagcacactcttggtgcttgataaatgttatgatgttatataataccaataactaagcacatttttagatcttttttcaaatggcttgtgtaaaatttggttaatgtacaatggttggtttgaagctatcatgtaaaattggcctctccaaatataatcagaaataaaccgaaaaaaatataaaaaaaaaaaaaaaaaaaactcgagggggggcccggtacccaattcgccctatagtgagtcgtatacnctaantnctttttntncctatagtgagtctta

SEQ ID NO: 23 - DNA, 1713 bp, Homo sapiens
gtctcaatggacacttagaagaatttgatgatcttactgtcataaaatcagtaatgaaattctcagcaaaactatttggtaaacattgcaccctgtatttttacccaacatcttgttatgaaaattatcaaatacattaaaaagttaataattttatagtgtactcactacctagatgctaattagcattacctatgcttgctttgtcacatatccattcatcatttcatattattatttgatgcattttaaattgcatatcattaactagagttcattgttggcttttttacataaaattagcatgcaatgaagtgcatagaaatatgtgttcactgaggtttggcaaatgcatatagtgctatggaaataggaaacgttatcaccaccctagaaagtttccacactgccctttccagtcaattcctgtccctacttgaccctcaaaggcaaccactgttcctttttctaccataagatttttctgttctaaaactttatataaatagagtcacgcaacatgtacgcttttctacaaggcttcatttttttattgctgttcttttttattgctgagtagtattccactgtatgacaatattacagtttgttttcttaatttcctattattgatagatacctgggctgtttccaggattggccattataaataaagctgctatgaccattcttacgtaagtctttgtgaacataggttttcatttctttgcagtaaattccttggattagaattgctgggtcacagggtagttttaaaagaaactgccatacctttttccagttcagttttattgtgccctgtattttgtattttgatgtgcataaaggtgtaaactatttttatgatccatattgaagtattagaagaagtgagtttggaataacaatggcattgttcatggtcaaggatgacaattggaactatctgaggaaagcaaagacctgtctgccccagacagctcctcaaggggttcctatgcctgaaactttagcaatatttcactccttgaaaggttaaagcccaaccatggtgatatgttagctagaagaaacagcactggtttgtttatgttactaactttcaccacccgttttcagtaggtaaagtaagactgatcattgaacagaaaaggttatttctgtgatgaggttgagggggtagtggaaagcatgtattgctagtaagccccaggtacagctatgtgagagagagtcacctggacagggaagtcccccaaatggtggccagaagagcagaaaacggggtgggaaaaattctacctcacagttttgcataggggatagctatgcttttacgggacattttagcgtttaaaaatattttcaatattgtctctttattcaataccacccagctgtagttttttcacactctgatgactctcttatccactcttttacctctcccagctgttctattacatacagcattcacctgtattagtctatagaattataatcatctgtgtgtttctaatgctcattttcaaaaatatgtatggtttattcgatttttcctattaaaattttaagggctgggaaatttggcttctactgtaaatccttataatgttccacacattgtaaatatgcaataaaaatgttaacaactawaaaaaaaaaaaaaaaaaaaactcgactcgtgccgaattcggcacgagcggcacgagc

SEQ ID NO: 24 - DNA, 1856 bp, Homo sapiens
ctgactttccacctttcctacaaattccgattactgttgctgttgactttgtgcctgacagtggttgggtgggccaccatgtaactacttcgtgggtgccattcaagagattcctaaagcaaaggagttcatggctaatttccataagaccctcattttggggaagggaaaaactctgactaatgaagcatccacgaagaaggtagaacttgacaactgyccttctgtgtctccttacctcagaggccagagcaagctcattttcaaaccagatctcactttggaagaggtacaggcagaaaatcccaaagtgtccagaggccggtatcgccctcaggaatgtaaagctttacagagggtcgccatcctcgttccccaccggaacagagagaaacacctgatgtacctgctggaacatctgcatcccttcctgcagaggcagcagctggattatggcatctacgtcatccaccaggctgaaggtaaaaagtttaatcgagccaaactcttgaatgtgggctatctagaagccctcaaggaagaaaattgggactgctttatattccacgatgtggacctggtacccgagaatgactttaacctttacaagtgtgaggagcatcccaagcatctggtggttggcaggamcagcactgggtacaggttacgttacagtggatattttgggggtgttactgccctaagcagagagcagtttttcaaggtgaatggattctctaacaactactggggatggggaggcgaagacgatgacctcagactcagggttgagctccaaagaatgaaaatttcccggcccctgcctgaagtgggtaaatatacaatggtcttccacactagagacaaaggcaatgaggtgaacgcagaacggatgaagctcttacaccaagtgtcacgagtctggagaacagatgggttgagtagttgttcttataaattagtatctgtggaacacaatcctttatatatcaacatcacagtggatttctggtttggtgcatgaccctggatcttttggtgatgtttggaagaactgattctttgtttgcaataattttggcctagagacttcaaatagtagcacacattaagaacctgttacagctcattgttgagctgaatttttcctttttgtattttcttagcagagctcctggtgatgtagagtataaaacagttgtaacaagacagctttcttagtcattttgatcatgagggttaaatattgtaatatggatacttgaaggactttatataaaaggatgactcaaaggataaaatgaacgctatttgaggactctggttgaaggagatttatttaaatttgaagtaatatattatgggataaaaggccacaggaaataagactgctgaatgtctgagagaaccagagttgttctcgtccaaggtagaaaggtacgaagatacaatactgttattcatttatcctgtacaatcatctgtgaagtggtggtgtcaggtgagaaggcgtccacaaaagaggggagaaaaggcgacgaatcaggacacagtgaacttgggaatgaagaggtagcaggagggtggagtgtcggctgcaaaggcagcagtagctgagctggttgcagstgctgatagccttcaggggaggacctgcccaggtatgccttccagtgatgcccaccagagaatacattctctattagtttttaaagagtttttgtaaaatgattttgtacaagtaggatatgaattagcagtttacaagtttacatattaactaataataaatatgtctatcaaatacctctgtagtaaaatgtgaaaaagcaaaaaaaaaaaaaaaaaaaaaaaac

SEQ ID NO: 25 - DNA, 1693 bp, Homo sapiens
gatccggggtcaccagttattagaggaagtaacacaaggggatatgagtgcagcagacacatttctgtccgatctgccaagggatgatatctatgtgtcagatgttgaggacgacggtgatgacacatctctggatagtgacctggatccagaggagctggcaggagtcaggggacatcagggtctaagggaccaaaagcgtatgcgacttactgaagtgcaagatgataaagaggaggaggaggaggagaatccactgctggtaccactggaggaaaaggcagtactgcaggaagaacaagccaacctgtggttctcaaagggcagctttgctgggatcgaggacgatgccgatgaggccctggagatcagtcaggcccagctgttatttgagaaccggcggaagggacggcagcagcagcagaagcagcagctgccacagacacccccttcctgtttgaagactgagataatgtctcccctgtaccaagatgaagcccctaagggaacagaggcttcttcggggacagaagctgccactggccttgaaggggaagaaaaggatggcatctcagacagtgatagcagtactagcagtgaggaagaagagagctgggaacccctccgtggtaagaagcgaagccgtgggcctaagtcagatgatgacgggtttgagatagtgcctattgaggacccagcgaaacatcggatactggaccccgaaggccttgctctaggtgctgttattgcctcttccaaaaaggccaagagagacctcatagataactccttcaaccggtacacatttaatgaggatgagggggagcttccggagtggtttgtgcaagaggaaaagcagcaccggatacgacagttgcctgttggtaagaaggaggtggagcattaccggaaacgctggcgggaaatcaatgcacgtcccatcaagaaggtggctgaggctaaggctagaaagaaaaggaggatgctgaagaggctggagcagaccaggaagaaggcagaagccgtggtgaacacagtggacatctcagaacgagagaaagtggcacagctgcgaagtctctacaagaaggctgggcttggcaaggagaaacgccatgtcacctacgttgtagccaaaaaaggtgtgggccgcaaagtgcgccggccagctggagtcagaggtcatttcaaggtggtggactcaaggatgaagaaggaccaaagagcacagcaacgtaaggaacaaaagaaaaaacacaaacggaagtaagcagagctgccaggctcccaggagagcatggggactaggaggaagggtgtggcatggctcagtctggcccccttgattaccggcctagcccctgctcacatcacagctgtctgaagaacagtgaggtggagtgcctagaactcccgtggtggtcctgagcagagaggaggatgtcctcctgcctgcctgaaggtctcccatgaaaacactgctgaactgtgttgacactcatgaccctttttttaaaccgttaaagggaagttcggtgttggagcgatactcaatgtagtcagtctacacctggacgtgtgggccacttaagccctccccacccccatcctattcctaaataaaaccaggataatggaaaaaaaaaaaaaaaaaaaaaaaaaaaaaaaaaaaaaaaaaaactcgagggggtcc

SEQ ID NO: 26 - DNA, 726 bp, Homo sapiens
ggcacgagggatgacaaagctcatgaatcggcttttaagaactgtttccatgttggagtatttcatcaaccggagttgggaatggagcacgtacaatacagaaatgctgatgtctgagctgagtcctgaagaccagagagtattcaactttgacgtgcgccagttgaactggttggaatacattgaaaattatgttttgggagttaaaaaatacttattgaaagaggatatggctgggatcccaaaagcaaagcaacgcttaaaaaggctccgaaatattcactacctctttaatactgccctcttccttatcgcctggcgccttctcattgcaagatctcagatggctcggaatgtctggttcttcattgtaagcttctgttataaattcctctcctactttagagcatccagcacgctcaaagtttaagagcatttagccatcgctttttatctggaacctctcagatacctctaaaacagcaaactgtgattctcaagattagaaagtaacaaggaatatgcccaaactgtcaaatgtcacctgttatgtattcgtccctattccttaactatgtatttttatttcagtgagagaaggaaagttgtaaactagcccatagtcacctatattttagggaaaaaaatccaaattgtttcctaacattctattttatgcccttgcgtattaaacgtgaaagtactcccaaaaaaaaaaaaaaaaaa

SEQ ID NO: 27 - DNA, 2793 bp, Homo sapiens
  misc_feature (223)..(223): n equals a,t,g, or c
  misc_feature (2782)..(2782): n equals a,t,g, or c
  misc_feature (2786)..(2787): n equals a,t,g, or c
gaaagatacactcaccggagaaaagaagtttctgaagaaaaccacaaccatgccaatgaacgaatgctatttcatgggtctccttttgtgaatgcaattatccacaaaggctttgatgaaaggcatgcgtacataggtggtatgtttggagctggcatttattttgctgaaaactcttccaaaagcaatcaatatgtatatggaattggaggaggtactgggntgtccagttcacaaagacagatcttgttacatttgccacaggcagctgctcttttgccgggtaaccttgggaaagtctttcctgcagttcagtgcaatgaaaatggcacattctcctccaggtcatcactcagtcactggtaggcccagtgtaaatggcctagcattagctgaatatgttatttacagaggagaacaggcttatcctgagtatttaattacttaccagattatgaggcctgaaggtatggtcgatggataaatagttattttaagaaactaattccactgaacctaaaatcatcaaagcagcagtggcctctacgttttactcctttgctgaaaaaaaatcatcttgcccacaggcctgtggcaaaaggataaaaatgtgaacgaagtttaacattctgacttgataaagctttaataatgtacagtgttttctaaatatttcctgttttttcagcactttaacagatgccatyccaggttaaactgggttgtctgtactaaattataaacagagttaacttgaaccttttatatgttatgcattgattctaacaaactgtaatgccctcaacagaactaattttactaatacaatactgtgttctttaaaacacagcatttacactgaatacaatttcatttgtaaaactgtaaataagagcttttgtactagcccagtatttatttacattgctttgtaatataaatctgttttagaactgcagcggtttacaaaattttttcatatgtattgttcatytatacttcatcttacatcgtcatgattgagtgatctttacatttgattccagaggctatgttcagttgttagttgggaaagattgagttatcagatttaatttgccgatgggagcctttatctgtcattagaaatctttctcatttaagaacttatgaatatgctgaagatttaatttgtgatacctttgtatgtatgagacacattccaaagagctctaactatgataggtcctgattactaaagaagcttctttactggcctcaatttctagctttcatgttggaaaattttctgcagtccttctgtgaaaattagagcaaagtgctcctgttttttagagaaactaaatcttgctgttgaacaattattgtgttcttttcatggaacataagtaggatgttacatttccagggtgggaagggtaatcctaaatcatttcccaatctattctaattaccttaaatctaaaggggaaaaaaaaaatcacaaacaggactgggtagttttttatcctaagtatattttttcctgttctttttacttggttttattgctgtatttatagccaatctatacatcatgggtaaacttaacccagaactataaaatgtagttgtctcagtcccctccaggcctcctgaatgggcaagtgcagtgaaacaggtgcttcttgctcctgggttttctctccatgatgttatgcccaattggaaatatgctgtcagtttgtgcaccatatggtgaccaggcctgtgctcagtttggcagctatagaaggaaatgctgtcccataaaatgccattcctattttctaatataaaactcttttccaggaagcatgcttaagcatcttgttacagagacatacatccattatggcttggcaatctcttttatttgttgactctagctcccttcaaagtcgaggaaagatctttactcacttaatgaggacattccccatcactgtctgtaccagttcacctttattttacgttttattcagtctgtaaattaactggccctttgcagtaacttgtacataaagtgctagaaaatcatgttccttgtcctgagtaagagttaatcagagtaaatgcatttctggagttgtttctgtgatgtaaattatgatcattatttaagaagtcaaatcctgatcttgaagtgctttttatacagctctctaataattacaaatatccgaaagtcatttcttggaacacaagtggagtatgccaaattttatatgaatttttcagattatctaagcttccaggttttataattagaagataatgagagaattaatggggtttatatttacattatctctcaactatgtagcccatattactcaccctatgagtgaatctggaattgcttttcatgtgaaatcattgtggtctatgagtttacaatactgcaaactgtgttattttatctaatccattgcttaatgagtgtgtttttccatgaatgaatataccgtggttcatatgttagcatggcagcattttcagatagctttttgtttgttgggaagttggggttttggggggagggggagtattagtacgttgcatgaaatagcttactttataatgatggaattgctttttcttttgtcttgtgatttttttttttgaagtgaaatttaactttttgtgcaagtagtactattatacccatcttcagtgtcttacttgtactgtatcacattccataccctcatttaattcttaataaaactgttcacttgttaaaaaaaaaaaaaaaaaaaancccnngggggg

SEQ ID NO: 28 - DNA, 1219 bp, Homo sapiens
  misc_feature (575)..(575): n equals a,t,g, or c
  misc_feature (582)..(582): n equals a,t,g, or c
  misc_feature (606)..(606): n equals a,t,g, or c
ttttttttttttttttttggacatgtctatggaaggataattccagaagtatcatgcaacggtagccaaggcacaggtcctgtctttaagcagtttatggtatagtggggaaaaggggtggtaaaaacacaaaatacctcccatgcaaatgtcctaactctcttcattaatcaatatctacatgatcccacaggtctacttctttatcttcatctctgcaggactagatatttgatagttactactttcccaatgctaacttcttcatttatcctgtcatattttgtttgtttcagtttttatttttttgtttgtttgtgttctgttttttttagagacagggtctcagtctgtcactcaggctggagtgcactggcacacaaaaagctcagcagcctgggacttctgggcacaaaccctcctcacgcatcaacctccaaagtgggtaggactacaggcatgtgccaccacatctggcaaatttttaaacttttttttttttgcaaagacagggtctcactctgttgcccaagcgagtctggaactcccgggcacaagcaatccacccacctcancctctcnaagtgctgcaatcacaggcattanccaccttgcccagcctgattttgtttttaatatatttcacagtcacattcgctgaaacttacttctcccttattctcttatatttcagtacttttcaacattctgtttggataacgtcacttatctggtgccaaatacttaaatcgtagtctgatctattcccaggaattcagcattaccagtgttctgactcctaaagctacattcttctgcttatctatactcacaaatttcagatctatatcctgttaaatatcacttgcatttttcaaagataccttaagtacaggatatcttaaccagaatcattccaaggaaaatgtgctgctctttccacttttcccaaggttggcaaatggcaccactttttcctcaccctctcgggtaggtatctttggtatctcccactgttctccatagccttatccacatttctgcttagcaaatccctacttttccacccttcaaaccacggctatgattttttgtaacccacactcaagtcctcctctacttcttgtagcatataatcagtctctccatataatgcctctcatgcctttacttttaaacatcaaatctgctcgtgtcgaattctttggatccactagtg

SEQ ID NO: 29 - DNA, 2630 bp, Homo sapiens
gctgcacttcccaggccccaccagccgcggctccggctcgtagcccacagcccactgccggcggctgggcgctgccgaggctcggggcgcgcgcagttggcgtctgccagtgccaagactgtgccgcccccacagccgaggcgcgaaagggggacgcccggcctctgggccgctgccttcgctttctcttcgttgttgcgaacgccgtccgctcaggaggcgccccgcgaccggcgcgatgagtgccaacgaggaccaggagatggaactagaagcattacgctctatttatgaaggagatgaaagtttccgggaattaagtccagtttcttttcaatataggataggtgaaaatggtgatcccaaagccttcttaatagagatttcctggacagaaacatatccccaaacacctccaattctatctatgaacgctttttttaacaacaccatatcatcagctgtaaagcagagtatattagccaagctacaggaagcagtagaagctaatcttggaaccgctatgacctatacattgtttgaatatgccaaagacaataaagagcagttcatggagaatcacaatcccatcaattccgcaacatcgataagcaatatcatctcaattgaaactcctaatacagccccatcaagtaagaaaaaagacaaaaaagaacaactttcaaaagcccagaagcgtaactggcagacaaaacagatcacaaaggagaacttcctcgaggctggaactgggttgatgttgtgaagcatttaagcaaaactggctctaaggatgatgagtagcacttggaatttgagacaaggaaagagcattctttaaagagtaaaactgggttcaaaatctttcattactattttctggtattgaggcgactttttataaaacacaattttttgtatgtttcttacattaaaaaggttgtaagttgaaagttcatgaagagatcttgttgtattaaattattttcacaaacttgccttaataaaaggtgaaaatgttactgtttagtatactttatgaagccccttgagctttataaatggacaggcatggggaataagaatcagtgttaatttaaatgatcttatcctggtggatgtgctrttttcttaaaggagtatgaagcccttttcaaactatcatcccagtggagcggagtactcagtgaacagttactccatagtgcaatccatattaataggcttcttctcttaagtcttcatctcttcttttgcttaattactgaaccgtaaattacttcagagaaatttaaatgctggtatttgaactttatacatgatactttttgtagtttcttttaatttttgaaagatgaactgcttccttttaataaattaatatctatttatacttttctcttgatttgggtcaagatgtttgatcatgagtgctttgagtggtatgtggaataggagaatataaaaacaaatctgccaaatacactagaaagcattttagtaagaaatgctggccctttcttaaaacatttctcttgcatataccaggatgggagtaaaagatgccttaatatttagtttttgtattgttggagacattgattttaataaaatcctatttatctgctgttgtgtgcttttagttgttggataactgaggtctcctaaatggttcaacataaaaccacatttcaagtcttgtttctttttggagtgtcttttcaagtattcaaatgtatttctcaacctgagcatctttttaatcatatacatgggagtcttttaaatgctgaactgttacacatgcttgatttaaaaataataataatagaggaaactattggtctagttgtgccaagaaaagtttctgatgtttatgtgtgatgtacagtgattttgtatatgcgcccagctttaagaacacataaaactattacgtctggtaggaagattgttagtgcctcaagttacacctgtgcagcttgggtctgagttttgatagaacagtaaacatttaaagaagttaagagcagtttgagctgtatccgcggtttttactcgttaactgacttcagctaaatagtttgaattatagagtaagtataattacagcaaaggagttaatctcattttcaaagctgtttctcattttatttcttgaattaatgtagagcaaaacatgttaaaattcaggacmactggaatatggcaacttatgtttcagggttgtgtgtgggtagtatttgtggttgtattggtttgttttttgtttttggagaaacatctgctagtggaataaaatactttgttttgctctgaagagactgaaattgttcaggcttattatggctcatagattacagagaatgatgctagttacatgccaatgaactatttttactctttttatatgaaatgtaaaaatttgtaggggttctggtgatggtggtacctcttattaccttatgtaaaacacttgaacagcctcatcaatattgccgtcatctgtttaacactcccagtatattttctcaatgtctgtttacttaaaattttgtggagtgacataattaataagcaataaagtctgaattatacacagaaaaaaaaaaaaaaaaaaaaaactcgag

SEQ ID NO: 30 - DNA, 1052 bp, Homo sapiens
gctgccgtgtgcacggccgtctggtctctctcccacacgtgtgcgcaacctgtcatggagatgtgagggccttgtgtgtgcttctgtgtgtgactgtgtgactgcgggtccagacccccgcctggcggtgatgtgggcccttaaatcactcttcctgctcaccccctccccagtgattcggttttactttgcagcactgtggatccgggcagctgggcggcttctcgggggtgggggatcccccaccccgcccacaagtctggccccagggttctcggaggcagggggtctctgttagtgcgctccctccagctgcaggcacatagcccgagctcacagctcgcctgagtcgacgccggctggggtgaaagctccaagtgggcctctggccttcccgctgctctgggtccagagtgtctggagcatgtggcacagaccagggccccttgtcctccgaggagggtgggacatcctctctgtctcacgcccctgggtggagattctggctggcctcctctccctgtttgccaaggtcaaagtgggccaagggtgcaggtgcttagcctggttccctctcccgggccccgaggttctgtgggttgggcagattggagacaggactcgtgtaagggctctgctggggtgaaggatggagacagagaaaatcaagatcctttcacaagttaattctacgtctgctgagccccagcccccgacacatcaccctgaggaggtgctaggcttctctgggccccctgtgccccatccacatgttgcagagtaaatctggccccttggacctggggtccgagatggacgcctggctgcccctcctggactgcgggtgacagctggcgagacactgcggggcttgggtgcggggagatggagtggggctgagctgcatttttccagccaccccacatcccacagaaggggagtcatggtcagtgccttgagctggaaagacgggcaatgcttccggcccacaccaaccaagaaaaccaccaggggctcattcatcctctcaaaaaaaaaaaaaaaaaactcga

SEQ ID NO: 31 - DNA, 1811 bp, Homo sapiens
  misc_feature (1804)..(1804): n equals a,t,g, or c
tccacggattctctgccacaaggatatgtggctcagtgtggtcaagttccttccaaagaacctgcacttggtctgcgtggacatgccaggacatgagggcaccacccgctcctccctggatgacctgtccatagatgggcaagttaagaggatacaccagtttgtagaatgcctgaagctgaacaaaaaacctttccacctggtaggcacctccatgggtggccaggtggctggggtgtatgctgcttactacccatcggatgtctccagcctgtgtctcgtgtgtcctgctggcctgcagtactcaactgacaatcaatttgtacaacggctcaaagaactgcagggctctgccgccgtggagaagattcccttgatcccgtctaccccagaagagatgagtgaaatgcttcagctctgctcctatgtccgcttcaaggtgccccagcagatcctgcaaggccttgtcgatgtccgcatccctcataacaacttctaccgaaagttgtttttggaaatcgtcagtgagaagtccagatactctctccatcagaacatggacaagatcaaggttccgacgcagatcatctgggggaaacaagacgcaggtgctggatgtgtctggggcagacatgttggccaagtcaattgccaactgccaggtggagcttctggaaaactgtgggcactcagtagtgatggaaagacccaggaagacagccaagctcataatcgactttttagcttctgtgcacaacacagacaacaacaagaagctggactgaggccccgactgcagcctgcattctgcacacagcatctgctcccatcccccaagtctgacgcagccaccactctcagggatcctgccccaaatgcggtcggagcgccagtgaccctgaggaagcccgtcccttatccctggtatccacggttccccagagctttggggaccacgcgaaaacctccaagatatttttcacaaaatagaaactcatatggaacaaaataagaaaccccagccatgaaatctaccatgaagtcttcaagttcatgtcactgacaagcttgtgcaaagcagccaccttggaccataattaaatcaaggacattttctttgagacattccttatagttggagactcaagatatttttgttgcatcaggtgtattcccttgcatgggcagtggcttttataggagcattagtcctcattcgctgaaccctgttgtttaggtctaatttaagttttacatagagacccatgtatgactgcagcccattggctgcaagaccagggaggaaagtggcaagctgtagaaaatgtttacacgcatggaggggcattgctccagccctcagagcgtccggagcagcaggrtacatgggtgggaggttcattcagcacccaccagtcaggtatgttctgagtgaacccacagcagtcgcagaatgagcacctggcagggtgggtttcctaggaataatttattatttttaaaaataggcctaataaagcaataatgttctagacatctgtctaagtaatcagactcaggttccacacacaagcaacaactcgtgggcctcttttctatttcaatgtgctactaagaacccttggatgtaacatactagttagttaatgaattctgtgaattctgtgaagagtaatgtgattgaaaataagtctaaacagctgtaaaagtgaccacaatgacatgaaataaatttaataagtctagatcagcaaaaaaaaaaaaaaaaaaaaaaaaaaaaaaaaaaaaaaaaaaaaaaaaaaanaaaaaaa

SEQ ID NO: 32 - DNA, 530 bp, Homo sapiens
  misc_feature (308)..(308): n equals a,t,g, or c
tcggcagagctcccctgcggttggaagtgttcatgcaaattccagatctgtcctggcccagcttggaggtgggccttcctgactgggccatcccttgcgagcgttctcagcccacactggctccctctgcgcaggcccctacttgtgaaggagctgagccgcactcggtgggctgtcctggggcacccatgttgtgtgttttggttttgtttattttgtatctgcctggtttttccaagtctaatcaggatgtcccctggggtgacattctttgctgagagaagggcacatgcctcggttccctgggnctgtagaaagccagtgctcagccttgctttctgccgcagacttggtgcccggagactcgctatcaaagtgcagtggagataatgtccaatgggaggctgaggcaggagaatggcatgaggcagagcttgcagtgagccaagatcgcaccaccgtactccagcctgggcaacagagcgaggctctgtctcaaaaaaaagaaaaaaaaaaaaaaaaaactcgag

SEQ ID NO: 33 - DNA, 471 bp, Homo sapiens
ggcacgagccagcacccacttcccacaggccttccctcctcccctgcctgctgacccggcagctcccgacagcacggccttgtttcccagggaacaatgcatctgtgtcacggacaacaatgtcctttcatgtcaggcgcactggccccggtgcacgccgggacgtggcacaaagggtgctttgtgcagctcagggatgtgagttcctggctttgccatgttggtgctgccgacccggggcctctgtccttgggtcccagttatgcaacagtcagtcgaggctgtggggctggcccaggggctttatctgtctccctctccaacttttgccaagttacccttctgggcttccgccagccaggagcccacactccctcagccctcccacacgctcctctcaactcctagctgggcttcgctgacttgaacctggccgagtttgcgggctcggggctccaaggtgcgctgctg

SEQ ID NO: 34 - DNA, 761 bp, Homo sapiens
ggcasagaccatatacttaacatgtatccctacagtaacctagtgaggtgactctcactatcgccatcttacagataagaccactgaggcactggctccgggcttctcatccagttggcggcacagaggagtccaaggtcaggttgtctagagtccagctcttctcacgaccctagtccgcctccacagaaccagggacgccggacaaggaggacactgccttcaggacccttctgcggaggtccctcatggtgcagaagttgggagtagaggcagaaacagctgtgaaaattctgatttgtttgtttctctgagccaagctaaagtggataatgaagccaagctggcaattaccttcctgtgcgtgataatggtggtagtggtgatgctgactgcagcaggatgacggtgatgtcagcagcgacaccattggtcttattgatggtggcagtgcccagggtggtgtgggggtaatagcatgagtgggtgctgggatgctgttagtgatcctgctagggccaggttagcttggaggggagagtgatgtccatcactgcagtggtggcaatgctgctagagacctcctgagtagttggactcgggctggcattgctgctgggaccttccctcacccccatcaggaagacccctctgctcctccccaccctcagtgaarggggcagggctcagarccttccgtagaactggctttattgcattccctgttctggacagtgtaagcsatggccctgcctctcgag

SEQ ID NO: 35 - DNA, 1550 bp, Homo sapiens
ccgggctaggagacctgttctgatgatgtgtgtggtcctcaccacactgccctgcctcaccttttccatagcagtgactgaggttcaaaagagcattaatgggtccgctgatgtcttacctgatatgttacctgacctgcccgtatctctggttctgttatccctgatcatggttgatattattgaaaaactcaggatatatcctcttagagggagtcaaaagagtaagtgttcttttaaatgtgaatattttttaaagtttgatatatttttcacatttctgccactgtgttatctgacaacatgtttaatgataccttttcttagggctaacattactgatagaagattgcaaatgaagatatctaaacataattatttttaaacctaccttgatagctagatagctgcttttgtttgctattcgcattttagtagtactgataaattaaaaattatcaaatagttaataccaaaaaccttaatgtttattccagcaagaaattatccaagtaaattattatagatgtatatttttctaggaagtctcttaaagcttatgtttaaatggattaataaaaagcttagtttggagacttttactacaggaattaatatgactgtggtagttgtgtcctagataatcatgtgtttaattgtgaattataaaaatgccaaagatcacactaataaaaccaagatatggctgggtgcagtggctcacacctgtaatcccagcatttttggaggccaggatgggaagatggcatgagctcaggagtttgagaccagcctgagcaacatagcaagacaccatccctataaaaaaataaaatttaaagaaaactcaacaagatgtgtcacatctcctccaaagtgatgagttgaaactaaatacagattggcccttacaaaaagatattttgttaatggaatattttatttatttagtcgtaaattactccagcctgggtgatagaacatacctctgtctcaaaaaaaaaaaaaaaaaaggaaagaaaatttgcatgcgtgtgtgtgttgaatgtgtgtgtttgggagaagggagagcttcatcatgatcaacaatatttttgtgtgtttaagagtggtgttttatgtgagatttcatttgggggaaaaaaaagcttcctctgctaaatgtttaaaaatcattaacctagggcttcattcagcattgtaaccgcacctgtttctaggacactaccatttctatgaagagatagataggttgccaactctctctccaggcccagctccctggcaatcatgactgcaccacctagaggcaaagtgagcccccatctaaggtcttgtgactactgctgctgctctgggcagtttcagctttgtaggcagagtgacccgtcttggtggggtacaaactggcttgaggctcaacacctttgaaaaacagataaaccttttaacatgccatgttgaattttttctttccaatgttgcatttttccaaaagaacacatactcatttaaaaaagttataaaatagagataaaaaaaaaaaaaaa

SEQ ID NO: 36 - DNA, 2187 bp, Homo sapiens
  misc_feature (347)..(347): n equals a,t,g, or c
  misc_feature (2097)..(2097): n equals a,t,g, or c
  misc_feature (2187)..(2187): n equals a,t,g, or c
ggccctcaatttatcctctgcctctgacaaatatattccattttgttacattgcaaaaatttcagcacattgctttgcttacccatctttgctctggaacgacttttaattcttcttttggcaatcttggttgttttgagatgtgtgaaattagaatcatatgcaggtgtttgagttcttttgattttgctttttaaaagagttttttttttgttttgttttgttttgtttttagaatggggcaatgtaaagccagaatatcaacgtccttttgtcaagatttcaaacctattkggstgatagtacacttacaagaataggtaaaaaagatcccaaagattttactncacttactkgaactactagccctactattaagagccacagcaagcttacagktcaaaaaaaaaaaaaaaaagagctgcaacattcctttcgcactcccactcgcccctgaggttcttccacttccttcctatggctttttttagaagcgagtgtgtttttctcacgtccggcaacaaaggatgttttgtgctactactgaggtttgtgtgtgtgacttactttagaactctttctagaaaatgcgattactatttgcataggtctggtagaactttgtattgagtgaaagtctccgatgactgtttttgtttttgtgtagatttgccactgcttaacatcaaatcactttcccctgtgtgttttaaaatacctctaataggacctgtcaaaattctcccagaagtctcacaaattcttacctttaaagaaagtgtaagtgataccttcagtgtattgtatttattcttatatacctttgcaaagacttctcatcacttccttaaatatgtctgatagtgccataatgagaaggggacatggtaattaaccatcaactttggttttcatggagaaaatctatctggagcagtcacagtatcctatgctggagctatcagatgccttgacattagatgtttccatctaattgtaattctctgagcaaggagacaaggtgggataaacagaattctcagatggctgagaattataccctaaatcctgggagagaatttacctttccattgtcagataatatgaatcatttaaaacatgtgctggaacagctttgccttttcttgaggaaaatggggtttctctctcaaagagaaagataaatgcgcctcagaagattttagtggtcgatctctgtcagtgtactaccagcaaaaatcccagcaatcaatattacaaagargcagcactcacttgagtacaraaktwacaacattagctgcttcgtwaacaagatggcatgggagatattctgttttgagtaaatgacaagtcctacagtctagataggaagatttytcctccatatggattttgtgatttygtcttgtgttgagtaaggaaggggagcttggattccaagatcaatttaatgtctatattccttggcattgtcatgttagagcagcacatctcagatggctttcaatagttattttagcattgattttcctctactagagtaaatcaaaagatgatttagaaaatcaaagtcagttttccttggagttttctcagaataaagggaagctgtggtgttgaagggtttttttggctcctatttacatatgatgcaaaatcaatctgtgtgaatctctttcctctgttgagctctactataggctctactatatgcagagccttgggtatttctgtgcgagggggattatgcaaaagaattttaaggcatgccacttgactttgtgaaaccaagtatttgtttaaagagacacgatattatagtgggaggctgttttgtgagaacccacactttcatgtcagcaccctgagatgggatcccattacgccctttaaccaggcaagggactttatgcagttcttcgtcaggaaaatggagacaattaaactgcttttctcataggttgttgtgtaaaaggcagcaagatgtggctgtgtaagaacatgactgaagccagactgcttatgcttaaaacctaggtgagctgtttacacctgatatgaccttggacaagtctcatctaacttctcttgccntcaggtgcctcatctgaagatagcagtgatgttagtgtctgccctcctgccctcataagcctggtcatggttggagaccatcctggccan

SEQ ID NO: 37 - DNA, 4115 bp, Homo sapiens
gcctgcaggaaccggtccggaattcccgggtcgacccacgcgtccggcgcagacgaggcctgaggcggcggcgcgaggcagtatggtttgaagtggtgaacatggatttttctcggcttcacatgtacagtcctccccagtgtgtgccggagaacacgggctacacgtatgcgctcagttccagctattcttcagatgctctggattttgagacggagcacaaattggaccctgtatttgattctccacggatgtcccgccgtagtttgcgcctggccacgacagcatgcaccctgggggatggtgaggctgtgggtgccgacagcggcaccagcagcgctgtctccctgaagaaccgagcggccagaacaacaaaacagcgcagaagcacaaacaaatcagcttttagtatcaaccacgtgtcaaggcaggtcacgtcctctggcgtcagctacggcggcactgtcagcctgcaggatgctgtgactcgacggcctcctgtattggacgagtcttggattcgtgaacagaccacagtggaccacttctggggtcttgatgatgatggtgatcttaaaggtggaaataaagctgccattcagggaaacggggatgtgggagccgccgccgccaccgcgcacaacggcttctcctgcagcaactgcagcatgctgtccgagcgcaaggacgtgctcacggcgcaccccgcggcccccgggcccgtgtcgagagtttattctagggacaggaatcaaaaatgttacttcttgctgcagattctgcgcaggatcggagctgtgggccaggctgtgtccaggacggcgtggtcggccctttggctggccgtggttgctccagggaaggcagcctctggagtgttctggtggctggggattggatggtaccagtttgttactttgatttcttggctgaatgtgtttcttcttaccaggtgccttcgaaacatctgcaagtttttagtcttgctcatcccactcttccttttactaggtctctccttacggggccagggcaatttcttttcgwtcttgcccgtgttgaactgggcaagcatgcatagaacacagcgggtggatgacccccaggacgtgtttaaacccacgacttctcgcctgaagcagcctctgcagggtgacagtgaggcttttccgtggcattggatgagtggcgtggagcagcaggtggcctctctgtctggacagtgccaccaccatggtgagaatctccgagagctgaccactttgctacagaagctgcaggctcgggtggaccagatggaaggcggcgctgccgggccgtcagcttcggtcagagacgctgtgggacagcccccgagggagactgactttatggcctttcaccaagaacatgaagtgcgtatgtcacacttggaagatattctgggaaaactgagagaaaaatctgaggccatccagaaggaactagaacagaccaagcaaaaaacaatcagtgcggttggtgagcagctcctgcccacagtcgagcacctccagctggagctggatcagctaaagtcagagctgtccagctggcgacacgtgaagaccggctgtgagacagtggatgccgtacaagaaagagtggacgtgcaagtcagagaaatggtgaaactcctgttttccgaagatcagcaaggcggttctctggaacagctgctgcagaggttctcatcacagtttgtgagcaaaggcgacttgcagacgatgctgcgagacctgcagctgcagatcctgcggaacgtcacccaccacgtttccgtgaccaagcagctcccaacctcagaagccgtggtgtctgctgtgagcgaggcgggggcgtctggaataacagaggcgcaagcacgtgccatcgtgaacagcgccttgaagctgtattcccaagataagaccgggatggtggactttgctctggaatctggtggtggcagcatcttgagtactcgctgttctgaaacttacgaaaccaaaacggcgctgatgagtctgtttgggatcccgctgtggtacttctcgcagtccccgcgcgtggtcatccagcctgacatttaccccggtaactgctgggcatttaaaggctcccaggggtacctggtggtgaggctctccatgatgatccacccagccgccttcactctggagcacatccctaagacgctgtcgccaacaggcaacatcagcagcgcccccaaggacttcgccgtctatggattagaaaatgagtatcaggaagaagggcagcttctgggacagttcacgtatgatcaggatggggagtcgctccagatgttccaggccctgaaaagacccgacgacacagctttccaaatagtggaacttcggattttttctaactggggccatcctgagtatacctgtctgtatcggttcagagttcatggcgaacctgtcaagtgaagacactactcattatttttgtacatttttgtatatactgggacagcgtgaaacactggaatccttcatggacgagggcatatacaatgatgggacagtgccacactccttcaataaacgtggctgctggccagaggacgtgagcgtgtgacgggcgccttggcgccacctgttgggtgctcactgcctctgcaggtgcagaggggtcagcagcaggagaagcgtgttgaacacgtggctctcagacactccttgtttttaacgggaagctctttgcatttgcatttcctcaacaaaggagcaaagcagaggaagctgagagtctggcgtgttcttgacgctttggtcttcagccttgcactggctcttctaaaggacttttggagggcagataatttcatctgttaaatccaacacacatttctttcagggaaaaacaatgtcaccaaattttcagagttctaaactcctttccttcaagccggaattttccttttttcagcaccagtaggtactaagtctccagatggggaaataactaaaatgtgtttttctgctttgttcgctcttacttctgaggaaggtttccagtcaggactcgctgtaccaatatccatggaggaatatgggagcgtttcgctctccttgtaggctgaagtcagtctgacttgaaggggcctggtttggatctaagcaaacacccagatggggttctctggtctcagcaaggcttttcctgttgggagtcacagtaaacagaaacccaaaaatctcatcttgggtgttttcagggcttgttttgagttttgctgaatagggagcgcaagacgccctgagcctccctctcactggtggtgataagaggagccgtctggtgtgtcagggtcacgaacccgttacatttcaggacgatcctttttccttcagcagcatttcttactggctgtggctggaatctgccttttatcacagctgtcaccattctcacgtgattcttgtgagactctttttggttataattactatttaatatttagactattttactgagcagactttataaatgagatatctacaaggcacttaaagtgttacagatgttttaccttaagaattatttaagttgtgttgggttaagacagttttcagtgtaccgtaaatgttgtgttttcagaaaaagacaaaacgatggtgctgactggttttctgtatattgcacaacagtcctcaaatacactgatgtatgaaactattcatacatcaagcagcatttttttcactctccttagaattggaactatgcagttaaggcagataaaatgtacagatgtttcatatattacaggttacatatataaatcaaaatttcctatataaaactgatttgggatttggggtggaaatattttgaatattaatttatttttaaagatgcaagataggactttgtgcaatgtatttttgtaaatgcttttcaaaatatctgtctttggtagtgcttctgctgctgccaccaaattgataagatgctattaagaggtttaaataaagagttttaatttttaaaagggaaaaaaaaaaaaaaaaaaaaaaaaaagggcggccgctctagaggatccctcgaggggcccaagcttacgggtgcattcaacgactaag

SEQ ID NO: 38 - DNA, 2196 bp, Homo sapiens
  misc_feature (1921)..(1921): n equals a,t,g, or c
ggcacgagctgagtttgtggctgcatttttatctctggtggctctgctacggcggcgcagaaatgaggcagaagcggaaaggagatctcagccctgctgagctgatgatgctgactataggagatgttattaaacaactgattgaagcccacgagcaggggaaagacatcgatctaaataaggtgaaaaccaagacagctgccaaatatggcctttctgcccagccccgcctggtggatatcattgctgccgtccctcctcagtatcgcaaggtcttgatgcccaagttaaaggcgaaacccatcagaactgctagtgggattgctgtcgtggctgtgatgtgcaaaccccacagatgtccacacatcagttttacaggaaatatatgtgtatactgccctggtggacctgattctgattttgagtattccacccagtcttacactggctatgagccaacctccatgagagctatccgtgccagatatgaccctttcctacagacaagacaccgawtagaacagttaaaacaacttggtcatagtgtggataaagtggagtttattgtgatgggtggaacgtttatggcccttccagaagaatacagagattattttattcgaaatttacatgatgccttatcaggacatacttccaacaatatttacgaggcagtcaagtattctgagagaagcctcacaaagtgtattggaattactattgaaaccagaccagattactgcatgaagcgacatttaagtgacatgttgacctatggctgcacaaggctggagattggggtgcagagtgtttatgaagatgtggytagagacaccaacaggggccacactgtgaaggcagtgtgtgagtcatttcacctggccaaagattccggttttaaagtggtggcccatatgatgcctgacctgccaaacgtgggactagaaagagacattgaacagttcacagagttttttgagaaccctgcttttcgtcccgatgggctgaaactctatcctaccctggtgattcgtgggaccgggctttatgagctttggaaatcaggaagatataagagttactctcctagtgacctggttgaattggtggctcggatcctagccctcgtgcctccatggactcgagtgtaccgagtacagagggatattccaatgcctttagttagctcaggagtagagcatggtaacctgagagagctggcacttgcaagaatgaaagacctcggaatacagtgtcgagatgtgagaaccagagaagttggaatccaagaaattcatcacaaagtacggccataccaggttgaattggtaaggagagattatgttgcaaatggtggctgggaaacattcttgtcatacgaagacccagatcaagacattttgattggcctcctacgattacgcaagtgttcagaagaaactttccgtttcgaattgggtggaggtgtctccatagtacgagagctgcatgtgtatgggagtgtggtccctgtgagcagccgggatcctactaaatttcagcatcagggatttggcatgctgctgatggaggaagcagaaagaatagctagagaagaacatgggtctgggaaaatcgctgtgatatcaggggtcggcaccaggaattattatagaaagatcggctacagattacaaggcccgtacatggtgaagatgctgaaataatggccacaccagtccactcttctgcagtatcctccctggcagaacacggagaatcaggatttcttaaatactcaacagagaggctgagcagagcaaatggggggcttcaccctcatcccgcagctgcagagactggaaactgccttcaaggccacggctggtcatctgctgaccacaccccagatccgccctctcctgcgtgcaccccaaaaaantcacttgcgtttttgaggcttaaatcatctatccagtttctacattttgcatgaggcctgcaggtggcctattttgactcagacggtgaaaaaagcaaattaactcatttggacaccataactcatgcaataaaactgattgtcattcgaggaaaaaaaaaaaaaaaaaaaaaaaaaaaaaaaaaaaaaagggcggccgctctagaggatccctcgaggggcccaagcttacgcgtgcatgcgacgtcatagctctctccctatagtgggtcgta

SEQ ID NO: 39 - DNA, 701 bp, Homo sapiens
  misc_feature (670)..(670): n equals a,t,g, or c
ccacgcgtccggttgcttctcagtatcatgttgcttctcagtattgtgttgcttctgattctatgaatgttcattttaagaccccttgttgaaatgggacagttggcagcggctctgatgagcccgagaagaggcctgcccttgggtgcggagtctccctccgcacgatgctcccacgcgtccaacttgcacccaaggggcttttccctcttccaagtggactccttcaaggaagctgcagctcggtcagcagagaaggggcctgccgccagcgccctggaggaagaggaagaggaacccaagaggatggcttgtctcccagcagccacaccggctttgtgctcagccagttcatttgagtttgcatgtttctctgcactatggattttgagcatttagatttctttaatcaaaagcgttttagtgactccagcagacccactgtcccagaaaagcctgatcctgtagtttatgtagaatgccacatctgcgtcctcaagacctgtttcatccatttgggaaaagatgttgggaaaggccactttgctcgcaggggtgaggggaaggatagagaatctatttttaataaataacattctagaaagaaaaaaaaaaaaaaaaaaaaaaaaaaaaaaaaaaaaaaaaaaaaaaaaaaaaaaaaaaaaaaaanaaaaaaaaaaaaraaaaaaaaaaaaaaaaaa

SEQ ID NO: 40 - DNA, 525 bp, Homo sapiens
aattcccgggtcgacccacgcgtccgcagtataatgcttgccagaaaaaaataggttaggagatcttgataatagtttaatatgatctgtatttttaaaatactagaaggttacttaatataccacatttccaagtccaaacggtgatcagagaaccccaaaataaaattttggcactgaattcataggaatacaattattttaaagcattagaaggaaagagaactcatagtctgtgttactgtgctgggtgggcttaggtttggggcttgtttgtattttgttttaccaatttagattcctttccacacttgcctgctaccacaagtaaggattgaggttaaatgggttttcatcttttattgggattggtgaaccttttaggattggtaaactgctttctcttgggcaagccaaactatctctcactaattgtttcaatagtggcccctttgaccttcctcttttcctttatctcaaacattaaaaaaaaaaaaaaaaagggcggccgctctagaggatccc

SEQ ID NO: 41 - DNA, 1526 bp, Homo sapiens
aattcggcacgagcgaaagcccacagttatggaaagaattactgtctagatggtctgcagaacgtgtttggggtgagtgggagtgaggggcaatgttactttttctccctgtagtttggagtccattatgagctgctgctttttcttctcatcttgtcatcttctggggatgtttgaaggctgagttccaacagaattcacaaagggaataaaacaggattgagattttgaggtgtgcacaaggtggtaagataaagggcatatgagcttcaaaactaatgctgttgcatacatgaagccttttgttttttgaggagctatttttgttattcttgtaacgctccaccttacatgccacatctgtgtgagtcaacagggatcaggtttggtcaccacacatgtctgaagctgggcagcgtctgctctgtgttctgtgtggaatggagaaaaaaacgcctgccctgctgccttccatgttcataggcccagcccaagagagtgacacacagtgctggccctgagacatttccacaaagtggtcaactctgccttgcatcctaaaactttttgggcatctattttgaaaactataggagcctttggaaggcctcttatgtttggaggggaagggtgttgagattgtcaccatccttcaagctgagactcctggtgagcctttgccaccatgaaaaccacatagctgaccagggctgtgcttgaggtacagaggacacacatcgtagacaggcctgtgtcatgtttccttacagtcgttttttacagagaaaaggggcattggtttttcactgctttctcaacagttcctgtgaataaatgaaacatttcggagctccctgagagcaagagccttcacttcttcttgcggtgccgggaccatgtgttggtgaagctggtgctgtgggggccactcactcgaatgacacctggaggcctgttcctcccttaccactcccttccccagcccgacttcttggcctcctgcccaaccagacacctcaaactctgtcagtgccctggcattctggcagagaatcctcaccagttctcaccaaccttccccccaggcaagggcagctgccagcatggtgctctgccaggacaggtttccctgaaggaagctgctcacactgagatgagcctctcagggcaggacctcttcccaagccctgcacacccacccctgcagcccttttggctccccttttccctgtgcctcagcactcctttcctggttgcagataacgaactaaggttgcctaaagggcagatctgccttctccatgtcttcgtcctggcaaacagggtcgtcttaaaattatgcgctaattctgtatgggagcactcaaaaggcattacttagagattgaaatttcaaactatctctagtttttcaatggaaatatatcagctagggaaaaaccatcaagctcattattattttttgatcttcagttgtatttttgtgaatattttaatacatctttttcaatttcttaaaaaaaaaa

SEQ ID NO: 42 - DNA, 1875 bp, Homo sapiens
  misc_feature (334)..(334): n equals a,t,g, or c
  misc_feature (966)..(966): n equals a,t,g, or c
  misc_feature (1304)..(1304): n equals a,t,g, or c
  misc_feature (1319)..(1319): n equals a,t,g, or c
  misc_feature (1329)..(1329): n equals a,t,g, or c
aattcggcacagtcagacgtggtagaaagacagtaagagaggaacaactagaagtggagcccgaagatgtgactgaactgctgcaatctcatgataagacttgaatggatgaagagttacttaagtggtttcatgagatggaatctactgctggtgaagttgctgtgaatattgttgaaatgacagcaaaggatttagratattacataaacttggttgggcagagtttgagaggattgactccaattttgaaagaagttctgctgcgggtaaaatgctgtcacacagcatcacatgctacagagaaatctttcatgaagagtcaatcaatgangacammcttcattgttgtcttatttcaataaattggcacagccactctagccttcagcaaccactgatcactcagttcagcagccatcaacatcaagacaagaccctctaccagcaaaatgattacaacttgctgaagggctcaggtgatcattagcgttttttagcaataaagtatttttagatataatgctattacatgcataatagactagagtacagtatagtgtaaacctaccttttatgtacactggggaaccaaaaaattgtgtaacttgctttattgtgatacttgctttattgtggtagtctggaacagatcctgcagtatccccaaggtatgcctgtatctcagtatagtcgtgatcataggtcttgcttttctttagattcactgttggtgttatcatccatgaatttcaccttcctgtgtacaaacatctcttattacagtaggagaatatgggagtcagaaaaggaagacatttattgtcattatgaactcagaaaatatgtttwctastgacattgaaacaactgagattgatattttccagccacggcagttttggtgattgaaagcaagatctgttttttaaaaattaaatataagtttgcacattcttccagggnaagggcacgggataatttcccttgccattttattttgaaaccagctttgttgtggtggcacgctccatgagatttgctccatgagatttgctccatgttgcaccacacacagtctttgctcctgtgtccttccatagaaaaaaacagtgtggggaargatttggtttgtcttaccctttaatcttctgctcctacagctctctggtctgatagttcactattttggtaataaagtcagatatagttcaaatcctgtctggtctattatttcgtgaaatttttgaacttttccatgctttggcatcctccaagaactttttcctttcwaagtttactgntttaataaatggacncctatgtgancacttttagactggagtctaaaagcscctaataggcttgctatttttagagaaggagaaagttgccttttgttctctctgtgcttttcacctcccacatgttctttagagttttttttcctgttctggtcttagtagtgacagctttctaatyccagaggctttttcctgggtctgtttctggctcattttgtctcatactcaaaatttttaatgtcagaattgggctgggctcttctctttctattatctgtaaacattttgggtttcttttcctctaatttatgaaaattatgaaatgtacacataaaggagtggaaaatatattcacccagtttaaagaagagtaataaaatggacattcgtatatacccaccatccaggttgagaaatagaacattgcttgtgtctcagaagctctctgtgttcctctcagtcacgttcccccaccccaactcctacccaaggtaacctctcatcctgaagcttacatggaagatttgggcatttttattaaaaaaaaaaaaaaaaaaaaaaaaactcgtag

SEQ ID NO: 43 - DNA, 1047 bp, Homo sapiens
  misc_feature (34)..(34): n equals a,t,g, or c
caggaactaggaggttctcactgcccgagcaganggccctacacccaccgaggcatggggctccctgggctgttctgcttggccgtgctggctgccagcagcttctccaaggcacgggaggaagaaattacccctgtggtctccattgcctacaaagtcctggaagttttccccaaaggccgctgggtgctcataacctgctgtgcaccccagccaccaccgcccatcacctattccctctgtggaaccaagaacatcaaggtggccaagaaggtggtgaagacccacgagccggcctccttcaacctcaacgtcacactcaagtccagtccagacctgctcacctacttctgccgggcgtcctccacctcaggtgcccatgtggacagtgccaggctacagatgcactgggagctgtggtccagacagaggggcaggccccagggtggagatgatctgccaggcgtcctcgggcagcccacctatcaccaacagcctgatcgggaaggatgggcaggtccacctgcagcagagaccatgccacaggcagcctgccaacttctccttcctgccgagccagacatcggactggttctggtgccaggctgcaaacaacgccaatgtccagcacagcgccctcacagtggtgcccccaggagggttscccagggcacccaccatcgtgctggttggcagccttgcctccactgcggccatcacctccaggatgctgggctggacccacgtgggcccaggtggtgaccagaagatggaggactggcagggtcccctggagagccccatccttgccttgccgctctacaggagcacccgccgtctgagtgaagaggagtttggggggttcaggatagggaatggggaggtcagaggacgcaaagcagcagccatgtagaatgaacygtccagagagccaagcacggcagaggactgcaggccatcagcgtgcactgttcgtatttggagttcatgcaaaatgagtgtgttttagctgctcttgccacaaaaaaaaaaaaaaaaaaaactcga

SEQ ID NO: 44 - DNA, 924 bp, Homo sapiens
ggcacgaggtcaggttgggtaggagagaggagagtcttggaggggctgctccatgggggtcacacctctctcctgtgggttttcgctggtgattgagttctgaggcatttgctgcattgactgttgtagctttaactcgtgtgcacgtgtgacacataaagccccaagagaagggctgcctggctcagatgcacttccatgctgattatatgcatgggtgttgaaagcagtgctggctgagcagcgatcccagtgcagtttgactttattctttgctcaaataggtgaaggcccacggtcccggcctcgaaggtggtctcgtgggcaagcctgccgagttcaccatcgataccaaaggagctggtactggaggtctgggcttaacggtggaaggtccgtgcgaggccaaaatcgagtgctccgacaatggtgatgggacctgctccgtctcttaccttcccacaaaacccggggagtacttcgtcaacatcctctttgaagaagtccacatacctgggtctcccttcaaagctgacattgaaatgccctttgacccctctaaagtcgtggcatcggggccaggtctcgagcacgggaaggtgggtgaagctggcctccttagcgtcgactgctcggaagcgggaccgggggccctgggcctggaagctgtctcggactcgggaacaaaagccgaagtcagtattcagaacaacaaagatggcacctacgcggtgacctacgtgcccctgacggccggcatgtacacgttgaccatgaagtatggtggcgaactcgtgccacacttccccgcccgggtcaaggtggagcccgccgtggacaccagcaggatcaaagtctttggaccaggaatagaagggaaaggtgggtttcatttaaaaaaaaaaaaaaaaaaaaaaaaaaaaa

SEQ ID NO: 45 - DNA, 1304 bp, Homo sapiens
  misc_feature (41)..(41): n equals a,t,g, or c
ggcacgaggttgggccaagggcagagggggctgcacctgcnggcctgggaagcattgctcagggtggggggctgggaccatggcccgcagaggcactgccacagctgtgagggccaagatgctgtccccccatccaaaacccgtgcgccactgcagtgagtgttgagggcacctctcctcccctcttacacctactcagatgaggcagcagcagacccatctcgcggcgggggttttgttctgttgccgcctaactttctcatcctcggtctctggaaagtcaggctgagaaatcctttcccaggccaggccgctgcggtacactggatggttctgaagctggcccattgaaagagcctcttaaggcagctgggacagaggcctggtggccctgctgggcagcccaactgctgggggagacgtttctgccaccctgggtgatgagcagcttttcccccctggctttctgggggaggagtgggcctccttagggagacaggtgaccctgggtgccacccctgccccgtgtgtgccccgggtgttctcagtggttgctgaaggcaggtagagggtgctgtccagtatcccccatgtgaaggtcacttcccttctcatggagtcagctgagcatcagctcagccctgccatgtccccactcaccctcctcgcctcctgtccggccctgggtttctagcggtgcctgaggcatcactctggcccattgacagatgagaggtctgaagccttcctggccacaggcatcactttctcctcctcctcatgccctgccttgtccttgtcgtgttgccatggggttctgagaggctgggagttcacagacctcagacacagctgagtccgacaaccattggggtggggctgcatcagtctccggagtggcccgccacctcctgaagcagggcctggcccacccaaggtgcctggggcaggcgggcaccgtcattcgctgccattggcttctcagatgtatttcaaggactaaagtgggctctaagatctaagatggcccggcgcggtggctcccgcctgtaatcccagcactttgggaggccgaggcgggcggatgagttgaggtcgggagtttgagtccccgtctctactaaaaatacaaaattagccggacaaggtggcgcatgcctataatcccaggtactcaggaggctgaggcaggagaatcacttgaacctgggaggcagaggttgcagtgagccaagattgtgccactgcactccagcctgagcaacaaaagcaaaactctatctttaaaaaaaaaaaaaaaaaaa

SEQ ID NO: 46 - DNA, 939 bp, Homo sapiens
ccacgcgtccgaaacgaagctgaattccccttcacggacctgaagcctaaggatgctgggaggtacttttgtgcctacaagacaacagcctcccatgagtggtcagaaagcagtgaacacttgcagctggtggtcacagataaacacgatgaacttgaagctccctcaatgaaaacagacaccagaaccatctttgtcgccatcttcagctgcatctccatccttctcctcttcctctcagtcttcatcatctacagatgcagccagcacggtgagctcagagaacgcaaagggagagagggggagtgaaggattttctcggtaggtaaattcctcctgcattttttgtaggttcatcatctgaggaatccaccaagaggtagatgcttggcatagctcatgctccacttagttcccatgtcattctcaagggaacccattggcacatccgggattggcaccctgagcccccaccccagcccattctgtgaccttcctcctctcccttcttctcccttcctctccctacattgccctcaccctctccccgaaatcttcacatcccatcctttcacgtgtgtctctctctttcagaaccagccattccaaacttccagagcaggaggctgccgaggcagatttatccaatatggaaagggtatctctctcgacggcagacccccaaggagtgacctatgctgagctaagcaccagcgccctgtctgaggcagcttcagacaccacccaggagcccccaggatctcatgaatatgcggcactgaaagtgtagcaagaagacagccctggccactaaaagaggggggatcgtgctggccaaggttatcggaaatctggagatgcagatactgtgtttccttgctcttcgtccatatcaataaaattaagtttctcgtcttaaaaagaaaaaaaaaaaaaaaa

SEQ ID NO: 47 - DNA, 871 bp, Homo sapiens
gtttttccttgtagcatttggaaatgatttactggaattacaaaacctatttttcctttaaatttcagctttggctctggctgctttttagaataatgcaagataaaaatcacacctgagggctgaaaacggagagggaatgggagacttgatatttaagcagcttgaatggtttttcttttctttatttttaaagaaatgcacttgcctatgatactgtctctccagtgaaatgattactcctccattactctattgatacaatattgtgcatgctagtgttgtatttctatacagtagcttgaaattgattaacttatactgtaggtgttatgtattcctatgacaaaaaaaattaagtcttcaaattttttaaaggttttttttttttaatttaattttcccttttgggggtaaagtttgctctaccaaatagtgattgtaacaaattgatctgttttggatgttgctatagtgacatgcagttatatattttgtttttaaaagggggggagcaaaagaaacaccagtgttagcttaatcttaatgtctggtgtttgtcatggtgaaattataactattacagtgtttggaaaacaacaaatatgttctctgaatgagcctttgtgctttttgtcatgttatgcagtgaactatttttaaggtctaatcagtgattatttttccagctccgtgtttctctaaggaattatttcacacacggaccatctttagcagtttcctcagtgatggaatatcatgaatgtgagtcattatgtagctgtcgtacattgagcaaataaacttacagatctgaaaaaaaaaaaaaaaaaaaaaaaaaaaaaaaaaaaaaaaaaaaaaaaaaaaaaaa

SEQ ID NO: 48 - DNA, 990 bp, Homo sapiens
ttaagacacgcgtcccaggtgtggatgtgtgggtgcttaagacagcagactgctgctttgctgggccaggcctgggtttatttattacaagcagttcaggaagcacagacatcacgttgttcacttgcttcactgatgaatgtaataattgttctcgttcatgccctttgcccctggtgtcggggctgtccacactggggaccattggtgcccccatgattattagctccctgaagcctggtgggtcgtcagggcttctgtccggtgtttaaagacccatcccagacaagcccaaaccacctcagtttgaagagacatagagggacaggcagacggggcctcagagggatccagcctcatccagcctcccggcaacctcaggagagcaggccagatggggcctcagagggatccagcctcatccagcctcccggcaacctcaggctggttcccttccagtgccgactccacagccctgctggttcccttccagtgccgactcccaggctgagtcgctttgcagcgtttgggacgtacgcagggcctgtgctgtgggccagccacttagtgcacttcctgagctcagaaacacgcagtggttcagcactgagtcatgcttgcttctctacgcactgatttgttctattccagttttcacgtacatcgttttggtgacatctctgcgttatcatttatttatatggagtgtattttctccaaaacttctctacgagggaatgcacctgctcattacagctgctgtctgtgtattcttcacggcaatggatcaaaccagactcacacagtcttagactaagctgaacactggaaaaataatacatgcttaaagtctgctgttattctaaaatgaaagatatgaattcaacaaagttgatggataactttctttgactgctctacctgaatttagactaagcagtaaatagtttaataaaagatcactttaatataaaaaaaaaaaaaaaaaaa

SEQ ID NO: 49 - DNA, 1275 bp, Homo sapiens
gcaactagtgacaagagctggtcgcaacacttagtaggaagcacagtggcataaggaaacctggactagtggggcctttatatctaaaattatgtattattccttatakgcagaatctgtaagtacgttatgactgctaatgacttttaaagcaaacatgttaacgatctttctatggtaaaaactgttatttggggacatcaccagatgatgtggacattcttgcaggtattttggcatacccaggcaagctgtcattggtgtatattccagttaacctctggagatgatcgtaacagtttacagggcctttccatttgggatggatatatcaagagggagacaaactggtccaaatcaccagaaagaaaatctcacagcaccgacttggcatctgtgttaaaaaatagcaactatatttaaaataaactgtacaacataaaaaatttaaattaaaaaatgcattaagcaagttgcctttagaaatgtgaagacattttaaaacactacaagataatgagcaagtctcacctacataatcatggctccacagacggtgccagtccatgcatccaccatttctcaacacctacaaagttttaagatctgcttggttcagatactgtccagccacagcagctccctctgctgtagagagcagcatattcagctttgcctttttatttcagatactgaatatcctttggcaatttcagatatcacagcaaaaaaaaaaaaagttccaagtgtttttggcaatcatattggtgatagtgtttttgttactcttaagaatgttatggtggaggtgggaggatggcttgagcctaagagttcaagaacagcctgggcaacagttgagtgactttgtctctacaaaaattaaaaaaaattagctgggtgtgttggtgtgcacccgtagtcctggctagctactccagaggctgaggtggatcacttgagcccaggagtttgagactgcagcaaaccatgattgtgccactgcactccagcctgggcaacagagaccgtgtctcaaaaaaaattgcacatataacagataaagtaatgataaagtaaatacgtaaagtaaatgagtaattatgggacattctaattcctcatcccctatgtctttaagaattaaaaattctcagtgtagaaggaagagtgtaatacagaattggttaaataaaaccctataagctttgaatttgaattggatatacaattggtaaaataaaaaccctatgagctttgaaaaaaaaaaaaaaa

SEQ ID NO: 50 - DNA, 779 bp, Homo sapiens
ggcacgagatagaataatgcagtggatttctatcatgctaatttattttgctttggagcaggtacctttcctctatggcattattttcttgcatttctcataaaggggaggatgcatcccaactgaatggctcactggcatgtcttttatgtgttcagttgccattcctagctttggaaagtttctatctgtccatgtgtatacaagtcaatgccccatttttgtttttcttttaaccgaggtgtagataaggaaaagggacatttttaattacttaataaccggaaatgcagatgtgtaaggagaatgagaggaatgagttaaagtggttatgcatttttctatagatgagccattacagcaaggaattttacagttgacttctctgaacctagctttaccacagtgattaaatcctatttagaaaggggaatctgatttaaatgtgtgattccttgtatttgctcctatcacaaagatatattaaaggaggtatgccattaatgaaatccactgtcctgagtattatctttcctcctgttgtactttctcagagactatggcagaatatctggatcttccttggattttgtacacatattgtagtgaaatgtgtcctacatctgaaattgcatgggactcatgcccagcaatctggttctaggcctttgacacctgataatatgagagcaattggccagccaatagccataagcccagaggattttagagcttcatgtgtggcttttaagagcaggtttgaaaaaaaaaaaaaaaaa

SEQ ID NO: 51 - DNA, 1316 bp, Homo sapiens
aggaattcggcacgagctttgactcccctcctttctaacagaatgttgccaccactgcttgagtgggctgtgtttgttcctctgtcccagcttctgttgtagaaaataacattgttaggggaactcaggctagtgtcagcgtcttggtttggggagaaaaaattaaatgtttcggtttttgtttcttttgctgttttgtttttaccttgttactttatcatattgactttagggtcaaaggcaacatcagaagaagtcagatatgtatagtgacattccaggggtggggaaggtgtagggatccagggttctcccggtcttggccacaggcacaatcatcaccttcatcgttccagattcctggggagaaaactgagaagatcgttacctgccagcctcatacagagcaaaagctctgtcctcagggccaagttctaaccactgctctgtagaccttctctgcaatcaagtggcctctaaggagcatgcctgaggacaaataactgtgcctcagtttcctcacctgcagatggggttatcaaataacacgaagtgtgcagcctgacctgtaggaggtgtgagtgtgttcccaaactaaagccccaggctgccatcatttacaggcttggcttgccccgggcccctcacccccgtttctgaccatcccaagtctctctgggacaggcaagtcactctggttctttaataagcttggaggtgttgggaagcttcagtggtactggccaggccaggaggaatcaggccaccagggctccatctctatcctgggatagcattcaccccactcctcctcagggctgaccccgactcatggcccctttaaaccctgaaggccgattctgccccttcctctgttatatgcacaactgaggaaggaggtaaaagtgggctcctaggtgagcccaaagtctcctgagagataagggaaaagaattggactgtaggtttaaaaaagttgctcttggccgggcacagtggctcacgcctataatcccagcactttgggaggctgaggcaggaggcagatcacctgaagtcaccctgaccaacatggagaaaccctatctctactaaaaatagaaaaattagctgggcgtggtggtgagtgcctgtaatcgcagctactcaggaggctgaggcaggagaatcgcttgaacccaggaggtggaggttgcaatgagccaaaatcgcgccattgcactccagcctgagtgacagagcgagactccgtctcaaaaaaaaaaaaaaaaaaaaaaactcgagggggggcccggtacccaattcgccctatagtg

SEQ ID NO: 52 - DNA, 528 bp, Homo sapiens
  misc_feature (106)..(106): n equals a,t,g, or c
gaattcggcacgagctcgtgccgagagtgcagagctccaggaaagggtatcagagctgcagccagctctgccctctaccctagggaggccagaaagacacaaacancctccgggcctttacgctggactctggcttggcaggctccaggcagggtcctctgggaagttactctagaaaacgaagggaggaggagcacaagatcctcagcaacgaacacctgcacttagaaaaagtggacagcttctgccaaccacaccctacccatggtactgtatgctattaactcctggaaacgccccgtaaatgcgagttgtttttgtatttgtgtgttgagatgggccttgtggtttctctgtactcagagcacatttcttgtaattactattgttatttttattgtcatgactgcccctgagctctggtgagaaaagctgaatttacaaggaaagggatgaagttaatatttgcatcacataattatatcattactgtgtaaaaaaaaaaaaaaaaaactcgaggggggggcc

SEQ ID NO: 53 - DNA, 778 bp, Homo sapiens
ggcacgagatttcttgaatgaatttcacatttgtaactatgattttggcagaatagaagattggctcatcagtgaagcgcagtatcttagctctagattctattttcatgcatcacagaagtgctatacggttaggtctgtttgtgcctcagtcaagaactaagaaatagtatgaattgtaagtcaagatgggcaactcagatggagcagcttagtctcacagtttgcttgtctatttattttatttagtgccaaatgtattccattttaaaagtaagccagagtgagtcaaggcatatacacactttctcacaaaacttcctaaacagatttgggggtttaatatgtccaactcctcatgaaatatattcaatccacttaaatatattccatctttttaacataaaatgtaaagcttagcacccatcattaatttatgtctctgttttatccagtggttaaaaaaggattctgcctctttagtcctcactgttaaataaaacccaatcatagtaagtgattaactagcaaaaagtaaagctatttatagcaaatttctagatcattagaaaagcactggtagttgtacaatatcagtgttgactttgaacttctttaacgagatcatgaattcttttcccttagccaaaacatgaaatatttaacctagttgtctctaaaagttttgtaatcatgagttagatatatgtcatctcctattcattgcttttatgtgatcaataaatcttttacaaacccaaaaaaaaaaaaaaaaaaa

SEQ ID NO: 54 - DNA, 1302 bp, Homo sapiens
ggcacgaggtctgtttgatttttaaaaggaaaggatttgtttcagattatacaagaataaaagtattatagacccaagggacttcttatgaggtcaaattcagatatttatatgaatatgaaataccatggtccctagtagtcagttgaagtggcaatgtctaaacagaaatgaacaaaactaatgctagcaggttaaaatcaatcaaaatgtttaaaaattgattctgtcctcagcatgttacttcctcagctctgataatttactggtcttgagtattttgagaatttgatgttgaacgttataaagtcaaagaactgcttgtttagatgaggtttatttttatttttgatattattcattcttgtcacacatcaagaagaaaacactagagtgctgctggaattccaaatctgaagaattctaacgactgcattctttgttattaaaaagggcacaatccttcctttttatttggcagtttaatttcagtaggaagcatgtcacatgtgcactgttggttagaattatgcatctgtcatgcctgactgctgaaccctacctaagccttttggcgcagtttaaaacttatactggtggactgtgaacctcaaaacaaatgggtatttttgggttttgaggatagatgttactccttaaagtttgtatttggggcatgaaaaactactgaaagaagaaaagtgctacagatactacatttcaaagagttggcattttccctttggccactcaagcagcatttgatgtatctaaagaaacaaagtcattgtttattttaaaaaattatatgcagttgtacaagatactacattccattgaaatgttggctatgtcctaaccaggcaaccagataacaaaaacattttgagtcttttatctaggtagttctaattattcagctacttagtttaacaaaggaaaatatcctgacttctctcatttcatttgtagacttttcattgtataggcacaaccaaagagtcagactggtttaaaactccagaaggaaaaaaagtatcccacacagtggatgttgtttctaagaatgctacaaaatcctgacatctcagacatctcaatgttaaaggaagaaaaaaaataccttttcatttcaaagaactaatatactttgatattgtgtaaaccttactcaagtttattgtcaagctttaactgcctttttagaactttttaaaatttcgagcccacaaatctattgtattagttgccttctataacaataaatcttcactgagcaaaaaaaaaaaaaaaaaaaaaaaa

SEQ ID NO: 55 - DNA, 1277 bp, Homo sapiens
ggcacgagctttaattcaaaaatgtttgtagttaacattattttgatttcttcagttgttgcttggaatgtttttatactgaccaagttggtatgtgacgtttatttttctctgactataaaagtaaaaaagaactgaaaatacccaaaaagtaatgttttatagaaagtctcccattgatttaagaagttatctattagattgatatcagaagtttcatatgagtatttggcttatgcatttctgtcttttggttttaggcaaaaggatgtcaattcttgatgttaaactttaggattcttaaagtataatgaagactggaatgggctgtggggaacataatagtggatgacagtgacttaggattcaattcagaaaatagttgtgaatctgttttattttggttacagcctactcatacgatttatttcatattttctaagtgtatttttgttcttcctgtatgtttcttggcccttgagtcttctctgtctttaatctttctctcctctcctactatttatagccagtctcatattaatttcctttctctagggcctttaaccacttggtgctcatttcagaccagtagtagtagcaacaaagttctgcaaatcaaatgtatcttcactcctgctgtatttaagacacagctatctcagtatcttaaaataacaatgtaattattttttggcatacccttgcctgacttctgaggacctcactaagtctagttctagcctttgtagaatggtcaacttctttcatcaaggctttggtttcattactggtgtctgaattagttccactcctagcttgacccagattttagtttttattatggattttttcttcaaacttgtttatttaatattaagttttcatttttggcagcatatggatgattttatttttaataatcatatctcttagtaaactaatggttaaataatattaaagtataagaagctaaaattggccaggtgtggtggctcacgcctgtaatcccagcactttgggaggctgaggcaggcagatcacctgaggtcaggagttcaagatcagcctggccaacgtggtgaaaccctgtctttactaaaaatacaaaaattagctgggcgtggtggcgcacgcctgtagtcccagctacttgggaggctgaggcagtagaatcacttcaacccaggaggtggaggttgcagtgagcaaagatcatgctactgccctccagcttggatgacagagcgagactccatcttaaaaaaaaaaaaaaaaaa

SEQ ID NO: 56 - DNA, 1058 bp, Homo sapiens
gactttttttcatctgcttattttcagcctatgtgtgtctttataagtgaaatgtgtttcttgtagacaacagataattgggtcttgtttttttatccattcagagccactctgtgtcttttgatttgagagtttagtgcgtttccattgttattaagaagtaaggatatgttctgccattgtattgtttgtcttttgcttgttttgtggtcttctcttcctttcttcattccttcatttcttttattgaaggtgattttgtcttgtggtatgatttaatttcttcctttttattttttaggtatatgtyatatggtttttgatttgaggttatgatgagtcttgcaaatattatcttacaacctattattttaagctgataaccacttaacattgcataggcaaaaacacacagaggcaaaaagaaaaccaataaaagctctacactttagcctcttgctttttaactttttgttgtctctgtttatatctcattataatttctatgtcttgaaaagttgtcattattagttttggttggttcatcttttagtctttctccttaagatcagagtattttatatatcacatttacagtgttataatatgctgcatttttttgtgtacttactattaccagtgagttttggaccttcagttgatttcttattactcatcaacttccttttctttctgattgaaaaactcccaggctggacacggtggcccatgcctgtaatcccagcactytgggaggctgaggtgggctgatcccttgaggtcaggagttcgagaccatcctggaaaatgtggcaaagctccatctgtwctaaaaatataaaaaattagttgggtgttgtggcgagcacctgtaatcccagctacctgtgaggctgaggcaggagatcgcttgaacccgggagacgaaggttgcagtgagccgagatcgcaccgctgtactccagtcctgggtgacagagcgagacgccatctcaaaaaaaaaaaaaaaaaaaaaaaaaaaaaaaaaaaaaaaaaaaaaaaaaaaaaaaagggcggcc

SEQ ID NO: 57 - DNA, 989 bp, Homo sapiens
  misc_feature (338)..(338): n equals a,t,g, or c
  misc_feature (352)..(352): n equals a,t,g, or c
ggcacgagtgaaggaggggggcattaagcaccctggggccccacgatgggcagcaagagtttgccgagggaggaaagcccaccggtggagtgggcagaggggttggtgtgtggacttctggagcctcaggaggaagggtgcgggttcccctggctgcagacgtccctgaggctgccctgcctcccccaggagagaccttcctgccctactacacgggccgcgccattgatggcatcgtcatccagaaaagcatgggatcagttcagcacggctgttcgtcatcgtgtgcctgctggccattggcaggtagctggctcaacccccacgccctgccccgnaaaccccgacctgnaaccagggaaggaaagggaggggcctgtttcctaaggaagacaaggggccagggaggccctggaaatgcccctggtgggcctgtccctcagctggtcaccctgggaaccggcttccacactgtcttagagcaccctagaaccacaccctctggtccctgaaaagggcttcagtcctcagggttccctgctcaccctccctggctgttttccaagtaggaatctggtcccaaacagaaccggctttgtctgagttgttctggaaggaagagggtctggctggcacatttgggtctcttgtcccacaactgtcccctttgccctcaccttgaggggggctcccactgggaatgagggggaccccgcagggatgccagccctggagtggggctgcggtggggctcccaggcctgcagctgcaggcattctgaggggcaacgtggaggaagggccagggatgcatgggattttaattgtttcatcacaccttccccgtggcaaagaaacagtcagtcctcttcaggtgtcttctggatttctggtgatggacagagaaatctttttacagtttcaaattatgttcaacaaataaaaattgcattttttattttgaaaaaaaaaaaaaaaaaaaaaaaaaaa

SEQ ID NO: 58 - DNA, 1919 bp, Homo sapiens
  misc_feature (1903)..(1903): n equals a,t,g, or c
agacagggwggcggtggcagaggacacttgtcatggccgcctctaaacctgtggaggcagcggacaccctgaaggtcccggtgctcacttggacatgaactctcttgatagagcccaagcagccaagaataaaggcaataaatattttaaagcaggaaaatatgaacaagctattcagtgctatactgaggctattagcttgtgccctacagagaagaatgttgacctttctacattttatcaaaacagagctgctgcctttgaacagttgcaaaaatggaaagaagtggcacaagactgtacaaaagctgttgaacttaatcccaaatatgtgaaagctctctttagacgtgcaaaagcccatgagaagctagacaataagaaggaatgtttagaagatgtcactgctgtgtgtatattagaagggttccaaaatcaacaaagcatgctgttagccgataaagttcttaaactccttggaaaagagaaagccaaagaaaaatataagaatcgtgaacctctgatgccatctccacagtttatcaaatcttacttcagttctttcacggatgatatcatttcccagcccatgcttaaaggagagaaatctgatgaagataaagacaaggaaggggaggctttagaagtgaaagaaaattctggatacttaaaggccaaacagtatatggaagaagaaaactacgataaaatcataagtgaatgctcaaaagaaatagatgctgaaggcaaatacatggcagaagcattgctactacgagctaccttctacctgcttattggcaatgccaatgcagccaaaccagatttagataaagtcatcagtttgaaagaagctaatgtgaagcttcgagcaaatgctctcatcaaaagaggcagcatgtacatgcaacagcagcagcctttgctgtccactcaagattttaacatggctgctgacatcgatcctcagaatgcagatgtttatcaccaccgaggacagctgaaaatactccttgatcaagttgaagaagcagtggcagattttgatgaatgtattaggttaagacctgagtctgctctggcacaagcacagaaatgttttgcattgtaccgccaggcatatacgggaaacaactcttcacaaatccaagcagctatgaaaggttttgaagaggtcataaagaaatttccaaggtgtgccgaaggctatgcactatacgcccaggcattaacagatcaacaacagtttggtaaagctgatgaaatgtatgataaatgtattgatttggaaccagataatgctacaacatatgttcataaaggtttacttcaacttcagtggaagcaagatctggatagaggtttggaacttatcagcaaggctattgaaattgacaataaatgtgattttgcctatgaaaccatgggaactattgaagtacaaagaggaaacatggagaaagccattgacatgttcaacaaagctattaacctggccaaatcggaaatggagatggcccatctgtattcactttgcgatgccgcccatgcccagacagaagttgcaaagaaatayggattaaaaccaccaacattataaaacagggggaaagcagactgaccctctttttaaaagtttaccccctcttcaactgaaccctaaagacactgtcatgaactgtgttgaatggtggaaatcagtatttctgtttgtggtgttgttatttgttacatctgtttcatgtctaggtgttgtgggtgtggctgttgaaggaagtttgcagtcttgcagcttttattccctgtgcaacaaaagattagaacatgttaaagggatttttaaataaagttgcaaagagtacaaatgataattggccatgcaaataaaaaaaaaaaaaaaaanaaaaaagggcggccgc

SEQ ID NO: 59 - DNA, 752 bp, Homo sapiens
ccgcttaatacagtatcctttcgatagcatctaaattggtgttttgttttgttttgttttcaactgttattagtaggcaaagccttctttcaaaataaaatcgacatgaagcctgtgggatttagcagactgaggcaaagcttccctggttgctttggaatgggaggcctggacctgctggctctttgccctcctgacacatcatcccttgtttccacagcacactcagcattggaagcacactgcagacggtgtctcattaaagcagtagctcccttgaacccacaagttaaaacgccagacttttatttatttgtttattttttctgagttcttattggcagacttcagaatgaggtacctgaggaaatatagaaacctctgccttaaggttgattttactaaatgctctattttctggtgcagttattgactgtcttatctcttttgtcaggaatgtcttttttaattagaagacaggaagaaaacaaaaaccagactgtgtcccacaatcagaaacctccgttgtggcagaggggccttcaccgccaccagggtgtcccgccagacagggagagactccagccttctgaggccatcctgaggagttcctgtttgggggtgtgagggaaaatcagcgcggattttaaaaagatggctgtggcctgcccggcgtggtgggaggggagctggtttcctggtgaactttctaaaaggaaaaataattttaagtaaagaaaaaaaaaaaaaaa

SEQ ID NO: 60 - DNA, 640 bp, Homo sapiens
ccacgcgtccggttacaatttgggtcagaaacggagagatctgtgttaatttttgcagaacttactgatttttgttcttttattgctcttgtcattaggatgaaaaccaaaaaagtatcttcagaggaaaaaaatcaccttttaatattgctagttagaaaatgtcatgaacagtgtatcttagaaatataatattctacttatttacacatgtcaaaatttgtgtctcttccagtgttccttgcctgtatctccccttggttcaatagctaccagatttttggaagaggaggaactgaggtctcatcacattctagagcgcttggatgcccatattgaagaactaaaaagagagagtgaaaagacagtgagacaattcacagccttaaagtagcctcttaaaaaaatcacaatcttggaaataaaaataaacaccaaagagttactgtcatctgaagtagcagctctttaaaaacatgaagagataaaattataaaaatgatacatctaaagcagtggtgaagaaagctgaaaaactgatacttttgataggcattttctctgcactggtttgtttaaaggacttcttccagcaataagttgaaagaataaaccactttgctagaaaaaaaaaaaaaaa

SEQ ID NO: 61 - DNA, 443 bp, Homo sapiens
ggcacgagagcgcccatcctgcagctcaactgggagcatcattctcctgctttgtacatagggtgtggtcccctggcacgtggccaccatcatgtctaggcctatgctaggaggcaaatggccaggctctgcctgtgtttttctcaacactacttttctgatatgagggcagcacctgcctctgaatgggaaatcatgcaactactcagaatgtgtcctcctcatctaatgctcatctgtttaatggtgatgcctcgcgtacaggatctggttacctgtgcagttgtgaatacccagaggttgggcagatcagtgtctctagtcctacccagttttaaagttcatggtaagatttgacctcatctcccgcaaataaatgtattggtgatttgaaaaaaaaaaaaaaaaaaaaaaaaaaaaaaaaaaaaaaaaaaaaaaaaaaa

SEQ ID NO: 62 - DNA, 1064 bp, Homo sapiens
ggcacgaggaagagtcagccttcttcttttcctggcctaggtagtagagctcatatagaaaaagtgagacaatattggtacaaaactacattatttattgcttccactgaaatgtcaagaggcagcaggtgaggcatgaggatgggcagttctcagaagttttcctgaacctacaggtttatgttaatttttttatgtataatttgtcttccttgtttatgatctcatttctagtctgccatgtaaccccttctcaaactttaaaaggacctcccttgagctggagctaacgagaccatttcttgtctgcttacaattttaaaaaaaaagctatttgcaagtaatttttctcattatgatgctgttatcataaagtgagattccagtagccagggtgtcaagggatggtatatggacagtgcaactttgacttactttactctacttagtcaaattttaactattttctggttcctttcatttgaatataatagttaaaataatgcagaccattcacagttcatatgttctccctttgtttttctctgactccacatgcactgacatgtatagtttctgctgaatttattaatttggtccagtttattcctgctgttaactttgatttcttttcctcctcttatctaatatttttcactatgatcagtatgttccatgaaatatatatattccttatttttctctcctaaagtataaacaaattgtcattgggaaaggagaacacttttctctgactcacataatgtagtagtaatcattcatattttacttatttgtggctgcataattgtaataggaagagtgtgtggccagggtgagcgaagccagaaaatatgttgctttggtagtttttccacattgctctcaaattttcatatattttgcttatttactggsccgtgtgtgacagtagtcacacaaatagtacctattattgtctaacttggggatgccatggggaaaggtgtarattttcttggcactggattctgcaacacttgattaatcttaattctatggcaaaaaaaaaaaaaaaaaaaaaa

SEQ ID NO: 63 - DNA, 1323 bp, Homo sapiens
aggcccagcaccacgggcctttccccaggccagggggaggaccacctaaggattcaagggcagctcctgttttcttggttctgtgaacactcgagtctgagccagcccctcaggaattgcctcaaaagagaaaaacaaaaaaaagtcctccttcccaaggcctgctactccaaggtttggctccatcccttgcctttgggtcctgcctatttccccactcctggtctcttatctttggggccaccagtggggagtcacccgggccccaatccctctaaggcgctaagttgaaggaggccttcccagagtgactattggtgccaaagtcccagttcctgttggacttggggtaaaaacaggagatggtgagtgggtgtaaggcccaaatgcccagagaagttaactcgaacccatgggacctgtcccagcctgtcagtccctgatgagtgtaacttccttcccctgggggcctggccyttctctccaacccagtggccatgctttctcacccagccttgtgcccggcctgcatttctgtatatattgctgtgtattgtgtgtatgtatgtattcctggacaagtgtgttcatctgcagcccttgcctgaggataaggtttaggattgggtaaagatcagaataccagggccagctaaggcaacgactccctccccaaacccttgggacctcagccagtcccaaggctgccctgacaatcaggcaggctccccaccgtgaggccaagcctcctctgccactgccagcatggcccaagggaggcttggccttgggcttgccagcctcagctctgccctgacaagggtcttgtatccagggcagaggcctgaggtgacccaggcttgctttgtggctgatgccagcaggcttggttctagtgggcaccactggtgggcaacctccataactggcccttaggccctaccttcctacacagctaggctataatgggcctgagtgagagggtagcttccccagccccaagcacaggcagaggggtggagagcaatttttggttttatttttgtttctgaagtggtgcctgtacctccagcccccagggggccttccctggccacacttctctgccccacccaggcatcgccatcccagcactttgctccatgtcacccgtaagatgccctttgctgaatgtacctgagtgtatgtatttaaaaggactcacatgggcatcagagaatttatggctctgtatccaataaaaaagatggtgaaactggwmaaaaaaaaaaaaaaaaaaaaaaaaaaaaaaaaaaaaaaaaaaaaaaaaaaaaaaaactcgag

SEQ ID NO: 64 - DNA, 2288 bp, Homo sapiens
gcaaaggtgaccagaagtcagcagcttcccagaagccccgaagccggggcatcctccactcactcttctgctgtgtctgccgggatgatggggaggccctgcctgctcacagcggggcgcccctgcttgtggaggagaatggcgccatccctacagaccccagtccaatacctgctccctgaggccaaggcccaggactcagacaagatctgcgtggtcatcgacctggacgagaccctggtgcacagctccttcaagccagtgaacaacgcggacttcatcatccctgtggagattgatggggtggtccaccaggtctacgtgttgaagcgtcctcatgtggatgagttcctgcagcgaatgggcgagctctttgaatgtgtgctgttcactgctagcctcgccaagtacgcagacccagtagctgacctgctggacaaatggggggccttccgggcccggctgtttcgagagtcctgcgtcttccaccgggggaactacgtgaaggacctgagccggttgggtcgagacctgcggcgggtgctcatcctggacaattcacctgcctcctatgtcttccatccagacaatgctgtaccggtggcctcgtggtttgacaacatgagtgacacagagctccacgacctcctccccttcttcgagcaactcagccgtgtggacgacgtgtactcagtgctcaggcagccacggccagggagctagtgagggtgatggggccaggacctgcccctgaccaatgatacccacacctcctcccaggaagactgcccaggcctttgttaggaaaacccatgggccgccgccacactcagtgccatggggaagcgggcgtctcccccaccagccccaccaggcggtgtaggggcagcaggctgcactgaggaccgtgagctccaggccccgtgtcagtgccttcaaacctcctcccctattctcaggggacctggggggccctgcctgctgctccctttttctgtctctgtccatgctgccatgtttctctgctgccaaattgggccccttggccccttccggttctgcttcctgggggcagggttcctgccttggacccccagtctgggaacggtggacatcaagtgccttgcatagagccccctcttccccgcccagctttcccaggggcacagctctaggctgggaggggagaaccagcccctccccctgccccacctcctcccttgggactgagagggcccctaccaacctttgcctctgccttggagggaggggaggtctgttaccactggggaaggcagcaggattctgtccttcaggccccacagtgcagcttctccagggccgacagctgagggctgctccctgcatcatccaagcaatgacctcagacttctgccttaaccagccccggggcttggctcccccagctctgagcgtgggggcataggcaggaccccccttgtggtgccatataaatatgtacatgtgtatatagatttttaggggaaggagagagggaagggtcagggtagagacacccctcccttgcccctttcctgggcccagaagttggggggagggagggaaaggatttttacattttttaaactgctattttctgaatggaacaagctgggccaaggggcccaggccctgtcctctgtccctcacacccctttgctccgttcattcattcaaaaaaacatttcttgagcaccttctgtgcccagcatatgctaggcccaccagctaagtgtgtgtggggggtctctacgccagctcatcagtgcctccttgcccatccttcaccggtgcctttgggggatctgtaggaggtgggaccttctgtggggtttggggatctccaggaagcccgaccaagctgtccccttcccctgtgccaacccatctcctacagccccctgcctgatcccctgctggctgggggcagctcccaggatatcctgccttccaactgtttctgaagcccctcctcctaacatggcgattccggaggtcaaggccttgggctctccccagggtctaacggttaaggggacccacataccagtgccaagggggatgtcaagtggtgatgtcgttgtgctcccctcccccagagcgggtgggcggggggtgaatatggttggcctgcatcaggtggccttcccatttaagtgccttctctgtgactgagagccctagtgtgatgagaactaaagagaaagccagacccctaaaaaaaaaaaaaaaaaaaaaaaaaaaaaaaaaaaaaaaaaaaaaaattt

SEQ ID NO: 65 - DNA, 2710 bp, Homo sapiens
ggggagaaatcagtgacagaggtgttttggttttattgttatgtgggttttcttttgtattttttttgtttgttttgtttttaaacattcaaaagcaattaaagatcagacataggagaaaccctgaatagaaacaaaacttttgaatgctggattcaaaaaaaaaaaaaagttatctggacagcttctttgagactatttaaaaactggtacaacaggtctctacaacgccaagatctaactaagctttaaaaggtcaagaagttttatggctgacaaaggactcgcgcaacgcagaaggcctttcccaccttaagcttccggggatctgggaattttacccccattctcttctgtttgtctgagtctcatctctctgcaagcaagggctgaaatcattttgtttggttgttttgagggagagaggcggggtgggggggtgcaaatctgccagcagctcttacgtaaggcatgttttattggggagggctgagcttttattttctcctctccagtggggttggcttttattgtttcttgtttgggtttggaatggaaatatggatagcagcataaagtacttttattttgacaaaattcatttttttcaacaatggagacatagatttgacccacaataacttctccccctctctttttactctgctcaaaaagcatctctcctcccattacccaaccttggtcataagtgtgcctggctggtttgcagatatttgttctgctttgtaaaaattggccattagtgcatttattgagatgatctctaaagagctatgccctgacctacccctgattctatgacattggggcccttcttttgctgaaactgccttacgtaatggttttactccttgaaagagatttgacggaatccattttatgccaagtgctgccctgcactgtttctgcaatatgtggtgtatgctgtggtgatcttgctgggaatgattataagtgtgtgtgtggtgggggagtgggtattacatgcattgctgaagagtcatcctggtgttcctcattcctcccaccttcccgtggtcattttaattacggggcagtgtcaccgcaaagggaggaaactcaaagccgaaagcaaaattccaggcctgattctggcttttgaggttcctggttcttgaagccaggcctgacccgactctcagatggggtcagtcccgtcgctttgcagactgaccctggaaatctacaaaatgcagattttcctgatttcctcttctcttgcccagtttttttttttttttttttttttaaagcctggattgtaaccagattttcttttttcccccttctcagctgtagatatgatatctcctttcagggccccagcttaagggcaaagtgagttaatgtgtagacaaaggcgagggacaagagagagttaacatctagacagtggaaaaagccatggtgtgtggtttctgggaaccaccaacacttgcaggtttagctttttcccagggttgactacaagaaagaaaaccatgtttttgcaagattaaaatgtggttgagtgtgcctaaattaaccatccccatttttatcatatttccaccatcacttcagggttttaagagtcagtgctcacctgggcggagctggtagtacattttgcttcttagaaagctaagtcctgggttccgtctgattttaggttccaggaacttcctgagaacacccgatcgcagagggtaattttctggagtttgttttgcagggatagctgggagtatggccaccctgctccacgatgcggtaatgaatccagcagaagtggtgaagcagcgcttgcagatgtacaactcgcagcaccggtcagcaatcagctgcatccggacggtgtggaggaccgaggggttgggggccttctaccggagctacaccacgcagctgaccatgaacatccccttccagtccatccacttcatcacctatgagttcctgcaggagcaggtcaacccccaccggacctacaacccgcagtcccacatcatctcaggcgggctggccggggccctcgccgcggccgccacgacccccctggacgtctgtaagacccttctgaacactcaggagaacgtggccctctcgctggccaacatcagcggccggctgtcgggtatggccaatgccttccggacggtgtaccagctcaacggcctggccggctacttcaaaggcatccaggcgcgtgtcatctaccagatgccctccaccgccatttcttggtctgtctatgagttcttcaagtactttctcaccaagcgccagctggaaaatcgagctccatactaaaggaagggatcatagaatcttttcttaaagtcattctctgcctgcatccagccccttgccctctcctcacacgtagatcatttttttttttgcagggtgctgcctatgggccctctgctccccaatgccttagagagaggaggggacggcacggccgctcaccggaaggctgtgtgcggggacatccgaggtggtggtggacaggaaggacttgggaaggggagcgagaaattgctttttctcttcctccctgggcagaatgtagcttttctgcttcactgtggcagcctcctccctggatccttagatcccagaggagggaagaaaatttgcagtgactgaaaacagtaaaaaaaaaaaaaaaaaaaaaaaaaaa

SEQ ID NO: 66 - DNA, 1442 bp, Homo sapiens
  misc_feature (126)..(126): n equals a,t,g, or c
  misc_feature (148)..(148): n equals a,t,g, or c
aattcggcagagctgggtttcccctaggctgtcccttcaccctggcagacctccctgcgcccttccagcccctctagttcttccccaggctccagtccagcacccacctagtgtgggcatctgctncacagtctcctgcgcgcgcatncaacagaggtggtctgtaccacctggtggcatcagctaggctttggtgccctccttccaactccctgaaccccctccaactgttggggagacaggacccaggctgttaccttccttgtgggtgagcttctcccccccagactcgtgagttttgaccgcaggtcggacgccatgacgtaacctttcttctccttgtccaccatcaacatggctagaagaatttctttctttgggtcttcttgttttatttgcatgtgcataatggtcagaaaagtggagagaatccagctctccatttccgtctaggaaacccgcaaacacagcagagtgagcagagggaaaaagactcctaggaagccagctggcctcctgctggacctgcacagccggttcaaggtcaactgaccagggaatgccaggatgtggcagtggtcacagtgaagaggatgcatcccctcccaccgagttcccacgacaggcccctcactggactggacattcttcatttcagcaacgtcctcagtgacgatgcttatcatcaccccaaagctcaagaaagtgggttcccaaccacagatggaggactgggctcctctgctcccttctagcgcttccctcctgccctgaactggagggaaacaggtccatgtgtgcattccacctttgacagccaccacagtacatcttaccaggatggatcagcacccccacctggggtctcaagcctcagtcgcaggctgggctgctcacctgccttcccctcactgcagtctccatcccagcccctcctccacgggccctggctgggatgtaactgcaggaaatcaaaacttccctggactacaacttcctgtttggaggggacagaaatcaaggaaaccaccacccctttggagctggacatgggggatctcaggtatcagaccactgagcaacccaccgccaggctgcaggctttcagaggcccacctgggcccagcgtggcctgccccagggtgggctcccagcgcaactgcaggcatcctctagtggggcctctggtaaccctagcagatggtggtgacccccctgagatgaggaagctggtgacctgagactgagcagcagcctatgggctccgggtcaagtgctattcccagcggatgcccttcccctgcgccagtccctccttcctgagtgtccagcccccaatgcaaacagcaaccccaggctctgaaactactttttttcttagaaaaagcaaaacaaaacataaaacttgtttctgattatgaaaaaaaaaaaaaaaaaaaaaa

SEQ ID NO: 67 - DNA, 1103 bp, Homo sapiens
ggcacgagcggcacgagtgccaatacaactgctgtcgccctcaatgcgccagcccaccctgcaaggctcctaccacctggacccgcagtagccctcctactgctccgggggagctgcagtctctgttgctgccaccaaccgcataaggcgagctgcaaagccatgccatctgcaggctccaatgtaccatagatgactcctcctcttcctcctcctccagcctggcttggagcagctagatgggcaaagctagaaaagcctaaaacgggatgcagggagtggtagcattagagcctcaccttgtcacgctggccactgggtggcagggaccagtttcagcaaaggcactcacacccaccctccaaagtccagcctctccttctggcaaaagctggccaggaactggggcccagggtgagtgtgtgtgcctttgctgaaaccagccctaggtcaggtcctgctggacagaaattgctgggtccaccagggctgcactcctcagggagcaggagtaggagaaactcaggcccagccagccctgcccacccaagttctggttcccgttcctgatgcctccacccacagtgccctatccccccacccccaccacagtggtgcccactactccctgcccagtagtcccaggttgtctctgcaacacagagcatgagagcatgggccagggaaccacggtgggtgtgggggccctgtcatactcaagattgtgcaaggaggaggagatcactctctagagtctggaattggggaagaggagaacggtcccttccttggagaccacctgaaggaggaaggaggccactgctgtcactgccacctccgcagcctgccaacgccactagcagtgtagcccctgatagcacccctaacctgctgcctgctgcctgccaccaacagtgtagcccctggatagcacaccaaacaaaccccgcaccagctgcagggtgtgtaaccccaatatcccccccaaagcaccctccctcccccagagcaggcagtgtagcacccaatagtgcccacaacctgacccagccatgggtgttgctgcactagatagcacccgaaacctgcccccccaaccccac

SEQ ID NO: 68 - DNA, 1047 bp, Homo sapiens
  misc_feature (5)..(5): n equals a,t,g, or c
ggcanagactcaggaggctgaagcgagaggatcgcttgagcccaggagttcaaggctgcagcaagctatgattgcaccactgcactccagcctgggtgacggcaagaccctgactctaaggaaacaaaaacaaaaacaaaagtgggtataaatatgactgcaaaactgctctgagctgctcctctctgcctatgcggtagccctgctctgcaggagcggtcacagagcagtaatactggctctctaataaagctgttttcttctgcctccggtttgcccttgaattctttcttgcacaaagccaagaaccctcctgaactaagccccactgtggggcttacctgccctgcatgaggtaagtatcaactatggctcaaaaggcaggtcaaaggcagcttttcaagtatatttgtgtcacagaaactcccactgtaacatcaaaaaatgaatgattttttcaattccctttattagggtttctttccctgcccccctcatttctccacttctttctcttctctccgtaggtatatagttatactctcccctcacacactcattttgtgtatgttcaaaaatattttggttatcttttatttctggtaactgctttttcatcctgcatgagcagccaagaaaagaattaatttagactttctgcaatgtcagggcctctcattcaattactctccttgtctcttggaagctctggtaacttagtttaatgacctctcacaccttacatccttaaaaaatgccccgtgtgtctcctggctcgggcagtcttaattatgttggcagctttaggtttccttattaccagcactccaggacctcatccccaccctgtccccatcttcatcttcacccagagcttcccatctccccacctcccttatcgccaatttctgtctgcactttatccacgatattcccatgttttctgctcttactagaaacattattttacccagcactgcatttttaaactgaaagaagatggtgattattatgcccttatcgaaatccattacttgaaaagctcga

SEQ ID NO: 69 - DNA, 1048 bp, Homo sapiens
tgcaggaattcggcacgagccaccaccccagcccattatctctattgatcctcactccaaccttgcaaaataggtagcgtattccagtggagaaactgaggcacaaagaggtgaaagacctttcctgtcacagttaggaaagtggcagaagccgtatttgaaccccagcaggtctccctctgaagtccacacacgtcagcgcctctgtgttgtctctttgccagcacagggctccctggagcccagagatgggggtggtgacttgaaggggttggcaagcctgggctcctccagcgaaaattcccttggccctgggcattcctaagcgagaagaggctcaatcctattttcttctcctaattggatgccttttattcctccttcctaattgaagtctggtcattgctggttgccatggcagcagccaaagcgctcatctcactgtggcttgtctctgcctgcggccaatgggaaacctcctttcccatatacggtggggacatggagtgtcaggctgtcgtattctggtggctggaggaggagaggaagtgagatgggaggaaaaaggcctgtcctctcccacgcagagactccggacagcaggatgtgtggaatccccagtctgttttcagccaggcagcaacagcatctgtactgagttgagtctatgtgtctaccagtgggctaagaacttcatgtgcagtatctcatttaatcttcgtgatggccccaggaagataagggatcaaggcccagaaaggctaagtaagctgccaggtcatccaaggagaaaatggcaaagcctggatttgaacagagactccagcttccttatgtgtagccatctcaccatgctacttctcagggggttactatgagtgtctctcatgtccccagacccagattacaggtttggaggaatacacagcccaccttcccaatatcgcaggcaacagttccaccaaatgccctgcatggcatcacagggagcctagttgcccactgctctactgctgagctcaatgccacccagcccgggctctctcga

SEQ ID NO: 70 - DNA, 825 bp, Homo sapiens
tgcaggaattcggcacgagccagagcagccctcaaagcctgggctgttgagagtgcacatcctggcctgcggtgacagccgtcagatggtgaggggccccaggcgactgccccagcagcagggcctgggagctgcacaggggagaactcgataaggagcatcatgagcatagtgggtccattgacaacatgcagtccccacggtggtgcctaatgacaaaatgacatcatgccacctgcaaaaaaagtaaaaatgatcagaggcgagcttgtcagagaagctttgaactaggtgactgcatgaaacatctcagaggcggaagagtgcctccccctccccgggactcccacctggtgccctgagctcatcatcccttctcttgtagcatatgctgtcaatacccagggccttttcgaaacggcaatgggtccgaaggcctcgggaccacctttcacacctcccctttatgcagtgtccatacctccttggtgctcagctgctggtcagctccatatgccctgtggtccctgccctcccaaggcctgtgaacaaatgcttagtcccagattagagtctacgtcaatctgggatgtgagctgagtggcacctgtcgtgaaccaggccagagtctacgcaatctggggtgtgagctgagtggcacctgtcgtgaacgtgcatgcacatgggcattttgtcagtctgcaccggtgaataaatgtcgctgcatttgccagctgagtgtcaccaggttccaggtcccattacacatcaggaattgtgtccgactcttctggatccgctgattggacctgagggatccctgac

SEQ ID NO: 71 - DNA, 621 bp, Homo sapiens
  misc_feature (616)..(616): n equals a,t,g, or c
attcggcacgagggaggaaagagggtggaatctggacagtatgaaggatttgtattgtacctgtaatgtttgatgtctgaagctgggtggtgggcatggctgtttgttattctccatccttttggtatgcctgatacatttcataataattttaaaaaggacaagactactgcagagaaatgcatagagtgagctctgtttgggtttttaaaatgattcctacatctatgcttgcagatgtaagcaccagccctggaaaacattgcaagggattcttagtaggcccaagctttgggaaagggccaagggggctggggagttgattaggaggggatacatgctttttcctgctgccttttgaattttgtaccacacgtagtattacttattaattaaaaaataatctgaactagccaggcgtggtggcacatacctagtctcagttacttggaaggctgaggcaggaggatcacttgagcccaggtggttgcggccagcctgggcaacatagtgagaccctgtctctttagaaaaaacaggccaggcatggtggctcacacctgtaatcccagcactttgggaggctgaggtgggtggatcacctgaggtcgggagntcgag

SEQ ID NO: 72 - DNA, 817 bp, Homo sapiens
  misc_feature (4)..(4): n equals a,t,g, or c
  misc_feature (7)..(7): n equals a,t,g, or c
  misc_feature (600)..(600): n equals a,t,g, or c
  misc_feature (683)..(683): n equals a,t,g, or c
  misc_feature (685)..(685): n equals a,t,g, or c
  misc_feature (728)..(728): n equals a,t,g, or c
  misc_feature (811)..(811): n equals a,t,g, or c
  misc_feature (814)..(814): n equals a,t,g, or c
atantgnatcactcattggaacattagctggagctccaccgcggtggcggccgctctagaactagtggatcccccgggctgcaggaattcggcacgagctcgtgccgaattcggcacgagaaattcatgggagtgggattattaaatagaataatatgaacaattgtatggcttatgtttgccttattgtattcccaaagagctgtaacattttatagcatcaccacttgggcaggggtattacctgttgttgctaatttagtaagtagaagagagagatcaaagtttctctaatttgtgtttgtgtaatttatctgtatactttcttcatttatataaataaatgtcttcactttgggaggctgaggcgggcagatcacctgaggtcaggagttcgagacaagcctggccaacatggtaaaaccccgtccctactaaaaatacaaaaattagttggatgtggtggctcacatctgtagtcccagctactagggaggctgaggcactagaatcacttgaacccgggaggcggaggttgcggtgagctgagttcacagcctgggcgacaagagttaaactccatctcaaaaaaaaaaaaanaaaaaaactcgagggggggcccggtacccaattcgccctatagtgagtcgtattacaattcactggccgcgttttacaacgtngngactgggaaaaccctggcgtacccaacttaatcgccttgcagnacatcccctttcgccagctggcgtaatagcgaaaaggcccggaccgatcggcctttccaacagtgccaacctgaatggcgaanggnaaa

SEQ ID NO: 73 - DNA, 1125 bp, Homo sapiens
cggcacgaggtgatgatggcctgttttggagtgtgtctgagactgggattgcatttggggtttcccgtgtgcttgggatgctagagggtcacctgcaggaggcctggggccggcgagaaatctcctgtgatgccctgtgaaatggcttgtctcctcccccatcagggcccaccgaaagctcaggggagcacagaagcccatggaagcccagggagatgtccctggggcagacactaaggcaggtgttgaagacaagctgcttgtcaagaagcatttcccggcaagagaggggcaagtcgggggctccaactgggtacagcctgggtgcagttataagcccctttggcttacttggtagaagatggctacttggatgtacctcacttaaagatgttttgtaccacactaggtctctgggcccttgtgcttcctgtgggtggggtgagggccaaaggctatggtttcctgcctccaggagaatggagagaaagggcttccaggcccctccaagcctggggaaggacgtggcatccaagctgagccagagggaactgctgctggcctcccttcatttctgtggaccttggaggctttggctttgtggcagggcctccccaggcagctctgggacctaggagtttgcttctgatagggtcagctttcccatttcccttcaatgcttgggaaccttctcccttagcttcacacttgccatttcaagccctgctgggaccttgtggcttggctggaatccaggactgtattttcatggagaagaacctgcagattcttccatcctcagctggccatggcccacagctctgcatctgcatctgagcttctcaggactcctggagcatggggggaatggggcggggccactgctctgtgctgacgggctccgtctcggagattcttgtcctgtttttttttctgttgtttttttttggctggtgctggggacaagcctgtgcctgccaaagctcccaggccaagtttgggggctggtgtttggggttgggtttggggttcaggatgctgcagtctgtgcaataataaacccgcatctgctcaaaaaaaaaaaaaaaaaaaaaaaaaaaaaaaaaaaaaaaaaaaaaaaaaaaa

SEQ ID NO: 74 - DNA, 1284 bp, Homo sapiens
ggcacgagactcgtgccgaattcggcacgagcaacagcaaaagcctagtgcattgggagatgtgcaacctccctgaaaatcttttctgtttctggagtacttcaggggtggcctctggccccagagcctttgccacagtgctcccaccagcccccacctcatccgtctgtttgcagagcctcatctacaggtccccacgctgccttctttactcactctgcgcttggccgttttgttatttggcttagtctacattgggcggaagtctgtgtgcacagagtgggtgttccttcgagccccttccactcagagggccacacccagcgatgccagtgaaggtggcacagcctctcttcagtttctcctgactgtgatctcactggggtagaattcccctgagagaatccctcactcacggctccctttgccagagtcagttcaatcaggtctgatgtgagcaatttacacacttgtctcagaaagtccctcagggtttgtagaggactgcaggggggcatccgctgcagactcagcctttctctgcagccatcctgcagtgggggtgagcgggcacaggctgagaactgctcttgggtggtggaagcaggtgtcacggtgcaagtctccccctgcacccctcccccagcttgagccgtgtcacccccctctccctccagcatgggcctgtgtctcaggctctctggaaggtggccctgccccggaccctcttgcaggtgtcctggtttgacttggaactagatggccatctttccaggctttggtggcccaagagcagtctgggtggatggaagtggctgtcccctcctctccagcccctgcccacccactggtggaggtgctaactagcagggacgtggcataggatgggagctgggcgtgaggtgcttggggtccattctttgtccctcagcttctcagagtccggccagcccttgtgttcccgtgccccacactttcctcctccccactgcagtgagtcaatagtccagggtggggcctggcctccctgccctgattggggactcaggaggtgaggcctgcggggcttcctgccccctccttgcccacctgcctgcccccgggcagcacgggagggagagcagggtgagcacgcttgttggtttcagatgcactttctgcttgccattgmccgtatctgtgcgttccttcatcctggtcctggctttatggaacaccatgtttttagcatgtttttaaataaaaacggataaagtgtcaaaaaaaaaaaaaaaaaaaaaaaaa

SEQ ID NO: 75 - DNA, 2927 bp, Homo sapiens
gctttttcataatctttccagagtcatcttagtgggatttggggaagcaacagggctgtgtggggtaacctgccacctttaagtggaarkcagaaatggagcaagagccacaaaatggagaacctgctgaaattaagatcatcagagaagcatataagaaggcctttttatttgttaacaaaggtctgaatacagatgaattaggtcagaaggaagaagcaaagaactactataagcaaggaataggacacctgctcagagggatcagcatttcatcaaaagagtctgaacacacaggtcctgggtgggaatctgctagacagatgcaacagaaaatgaaagaaactctacagaatgtacgcaccaggctggaaattctagagaagggtcttgccacttctctgcagaatgatcttcaggaggtgcccaagttatatccagaatttccacctaaagacatgtgtgaaaaattaccagagcctcagtcttttagttcagctcctcagcatgctgaagtaaatggaaacacctcaactccaagtgcaggggcagttgctgcacctgcttctctgtctttaccatcacaaagttgtccagcagaagctcctcctgcttatactcctcaagctgctgaaggtcactacactgtatcctatggaacagattctggggagttttcatcagttggagaggagttttataggaatcattctcagccaccgcctcttgagaccttagggctggatgcagatgaattgattttgataccaaatggagtacagattttttttgtaaatcctgcaggggaggttagtgcaccttcgtatcctgggtaccttcgaattgtgaggtttttggataattctctcgatacggttctaaaccgtcctcccgggtttcttcaggtttgtgactggttatatcctctagttcctgatagatctccggttctgaaatgtactgcgggagcctacatgtttcctgatacaatgctacaagcagcaggatgctttgtgggggtcgtcctgtcctctgagttaccagaggatgatagagagctctttgaggatctgttaaggcaaatgtctgaccttcggctccaggccaactggaacagagcagaagaagaaaatgaattccaaatccctggaagaactagaccctcctctgaccaactaaaagaagcctctggcactgatgtgaaacagttggaccaaggcaataaggatgtacgtcataaaggaaaacgtggaaaaagggctaaagatacttcaagtgaagaagttaacctgagtcacattgtaccatgtgagccagttccagaagaaaagccaaaagaattacctgaatggagtgaaaaagtggctcacaacattttgtcaggtgcttcctgggtgagttggggtttagtcaaaggtgctgagattactggtaaggcaatccagaaaggtgcttctaaactccgagagcggattcaaccagaagaaaaacccgtggaagttagtccagctgtcaccaagggactttatatagcgaagcaagctacaggaggagcagcaaaagtcagtcagttcctggttgatggagtttgcactgtagcaaattgcgttggaaaagaactagctccacatgtcaagaagcatggaagcaaacttgttccagaatctcttaaaaaagacaaagatgggaaatctcctctggatggtgctatggttgtagcagcaagtagtgttcaaggattttcaactgtctggcaaggattggaatgtgcagctaaatgcatcgttaacaatgtttcagcagaaactgtacaaactgtcagatacaaatacggatataatgcaggagaagctacccaccatgcggtggattctgcggtcaatgttggcgtaactgcctacaatattaacaacattggtatcaaagcaatggtgaagaaaactgcaacacaaacaggacacactctccttgaggactatcagatagttgataattctcagagggaaaatcaagaaggagcagcaaatgtcaacgtgagaggggagaaggatgagcagacgaaggaagtaaaggaggcaaagaagaaagataaatgatgaagtgctgggaatcacttataccaaagccttatgaaatggatgaaattttgttaaataggcaaatgtggaattcctcacagattaaccagtattttttaaatgtattcattcctacaaattaactttcataaattttatggcatgtcttctatttaaaaggaaaagaataagtattcttgcatctggccttagaaatgtgaagttatattctcaagtttatttttttccaagtgtagctaaaatatttttgcaggtaaaataaagctgatagtacatgtgttgttcaaaccttgttaaacctaatattgaactatttttatatctgctgtctttcagaaggcaaataggaaactatatatttgcttaaaaattggcatttagtaaccttaattctttttatagaaggaatgacttaaagtattgtcccctctttttgcactaattgtggatttttttagatgcttctcaaaattttcagtgtgtaagctaaacaaaaactaaaactaagaattctcaaaaaaacttgttcaaaacagggaaagactgatgaaaagtaaaatggactacttttgtaacttacctgtttgttaggaaatggaatggtctctttgatttaaaatgaataaaaatagattattacgtcttttgtattgagactgtattgttatgagcctaggaaatttgggaacatgattgtattgtattaaaattcgaagtgattattatcagcttaattggattaaaaaagtacttcaagaaattaaaaaaaaaaaaaaaaaaaaaaaaaaaaaaaaaaaaaaaaaaaaaaaaaaaaaaaagggggggggc

SEQ ID NO: 76 - DNA, 1249 bp, Homo sapiens
  misc_feature (1138)..(1138): n equals a,t,g, or c
  misc_feature (1196)..(1196): n equals a,t,g, or c
  misc_feature (1202)..(1202): n equals a,t,g, or c
  misc_feature (1225)..(1225): n equals a,t,g, or c
acgtcccgcgcgtcggcggccgcggagcagcgcagggagccaggcgggctgccggcgggtgtgaagaaaaaaatgacactccaatgggctgcagtggcaacctttctttatgccgaaataggactcattttaatcttctgcctaccttttattcctcctcagagatggcagaagattttttcatttaatgtctggggtaaaattgcaactttttggaacaaggctttccttaccattatcatcctattgattgttctatttctagatgctgtgagagaagtaaggaaatattcctcagttcataccattgagaagagctccaccagcagacctgatgcctatgaacacacacagatgaaactttttaggtctcaaagaaatctttacatttctggattttccctatttttttggctagttttgagacgtctggttacgcttattactcaactggcaaaagaactgtcaaacaaaggtgtacttaaaactcaagcagaaaatactaacaaggctgccaaaaaatttatggaagaaaacgaaaaactaaaaaggattttgaaaagccatggtaaagatgaagaatgtgttttggaagcagaaaataaaaaactagtagaagaccaggagaaactgaaaactgaattaaggaagacttcagatgccctttctaaggcacaaaatgatgtgatggaaatgaagatgcagtcagagagactttcgaaagaatatgatcaactcctgaaagaacactctgaacttcaggatcgtttagaaagaggcaacaagaaaagactgtgaactttataaaagacacttgcaatatactgtgtcaaaatgataattttgttatgttagcctctagaaaatttaagttcagaaaaatgcactatgaccggttcgtaatttttttaatgccacacataggttgtattgtaatggcattatcaaaatatttgatgatgtttcagatatattgcaaagtctgtattccagctcttaagaaaaatataagcatgttaaataccatatttacatattgataatgtcattggtatatggtggctgtttaccaataaaaggaaaaaattcattaaccggttgcttccaaaattaggaagwtytamgttgcatgaaaccnttaataggccttggaaagctttggattaaggttttccaggtaattaataacccctttnaattcnggatggatggtgtgtttggaaanaggtgttccatttccggccaattt

SEQ ID NO: 77 - DNA, 3097 bp, Homo sapiens
ccagcttgctcgcactcggctgtgcggcggggcaggcatgggagccgcgcgctctctcccggcgcccacacctgtctgagcggcgcagcgagccgcggcccgggcgggctgctcggcgcggaacagtgctcggcatggcagggattccagggctcctcttccttctcttctttctgctctgtgctgttgggcaagtgagcccttacagtgccccctggaaacccacttggcctgcataccgcctccctgtcgtcttgccccagtctaccctcaatttagccaagccagactttggagccgaagccaaattagaagtatcttcttcatgtggaccccagtgtcataagggaactccactgcccacttacgaagaggccaagcaatatctgtcttatgaaacttgctctaccagcaatgcgatgcccagccaggggccagcgggtctggggtctatgtgaggatgtggaagagacagcagcagaagtgggagcgaaaaattattggcattttttcagggcaccagtgggtggacatgaatggttccccacaggatttcaacgtggctgtcagaatcactcctctcaaatatgcccagatttgctattggattaaaggaaactacctggattgtagggaggggtgacacagtgttccctcctggcagcaattaagggtcttcatgttcttattttaggagaggccaaattgttttttgtcattggcgtgcacacgtgtgtgtgtgtgtgtgtgtgtgtgtaaggtgtcttataatcttttacctatttcttacaattgcaagatgactggctttactatttgaaaactggtttgtgtatcatatcatatatcatttaagcagtttgaaggcatacttttgcatagaaataaaaaaaatactgatttggggcaatgaggaatatttgacaattaagttaatcttcacgtttttgcaaactttgatttttatttcatctgaacttgtttcaaagatttatattaaatatttggcatacaagagatatgaattcttatatgtgtgcatgtgtgttttcttctgagattcatcttggtggtgggtttttttgtttttttaattcagtgcctgatctttaatgcttccataaggcagtgttcccatttaggaactttgacagcatttgttaggcagaatattttggatttggaggcatttgcatggtagtctttgaacagtaaaatgatgtgttgactatactgatacacatataaaactataccttatagtaaaccagtatcccaagctgcttttagttccaaaaatagtttcttttccaaaggttgttgctctactttgtaggaagtctttgcatatggccctcccaactttaaagtcataccagagtggccaagagtgtttatcccaacccttccatttaacaggatttcactcacatttctggaactagctatttttcagaagacaataatcagggcttaattagaacaggctgtatttcctcccagcaaacagttgtggccacactaaaaacaatcatagcattttacccctggattatagcacatctcatgttttatcatttggatggagtaatttaaaatgaattaaattccagagaacaatggaagcattgcctgtcagatgtcacaacagaataaccacttgtttggagcctggcacagtcctccagcctgatcaaaaattattctgcatagttttcagtgtgctttctgggagctatgtacttcttcaatttggaaacttttctctctcatttatagtgaaaatacttggaagttactttaagaaaaccagtgtggcctttttccctctagctttaaaagggccgcttttgctggaatgctctaggttatagataaacaattaggtataatagcaaaaatgaaaattggaagaatgcaaaatggatcagaatcatgccttccaataaaggcctttacacatgttttatcaatatgattatcaaatcacagcatatacagaaaatacttggacttattgtatgtttttattttatggctctcggcctaagcacttttttctaaatgtatcggagaaaaaatcaaatggactacaagcacgtgtttgctgtgcttgcaccccaggtaaacctgcattgtagcaatttgtaaggatattcagatggagcactgtcacttagacattctctgggggattttctgcttgtctttcttgagctttttggaaggataattctgataaggcactcaagaaacgtacaaccacagtgctttcttcaaatcatatgagaaatactatgcatagcaaggagatgcagagccgccaggaaaattctgagttccagcacaattttctttggaatctaacaggaatctagcctgaggaagaagggaggtctccatttctatgtctggtatttgggggttttgtttgtttttgctttagcttggtgaaaaaaagttcactgaacaccaagaccagaatggatttttttaaaaaaatagatgttccttttgtgaagcaccttgattccttgattttgattttttgcaaagttagacaatggcacaaagtcaaaatgaaatcaatgtttagttcacaagtagatgtaatttactaaagaatgatacacccatatgctatatacagcttaactcacagaactgtaaaagaaaattataaaataattcaacatgtccatctttttagtgataataaaagaaagcatggtattaaactatcatagaagtagacagaaaaagaaaaaaggactcatggcattattaatataattagtgctttacatgtgttagttatacatattagaagcatatttgcctagtaaggctagtagaaccacatttcccaaagtgtgctccttaaacactcatgccttatgattttctaccaaaagtaaaaagggttgtattaagtcagaggaagatgcctctccattttccctctctttatcagaggttcacatgcctgtctgcacattaaaagctctgggaagacctgttgtaaagggacaagttgaggttgtaaaatctgcatttaaataaacatctttgatcacaaaaaaaaaaaaaaaaaaaa

SEQ ID NO: 78 - DNA, 1160 bp, Homo sapiens
ttaagtggtctgcccttccactgaaagtgtagctttttgacagtctcagccatataaacaggatctcagtttcatccttccatccatccattagaggcacaaggtctcatctcttttccttttgggcattaaaaccaaagttcatacattattgagacaggccgactctgctaaggcagcctgtttggcctttaagttttattgcttattttttgagtatgtatttatttttttgattattattatttttttttttgagctttaagccttcaagtttcctttttattcttgacccctagacatttcctttgcttgtggactcgggtatttgtttttaggtaatatttttwttccctatgacacagccctcaggagatcctgagaacatgtgccctcatttttaggtaattttaattaggaagggttttaggttgtctgatctgccttgttgctagaaacagaaattctcctatkgattgatttttcaaaccacttcttagtggcctctacaactactccagtcaggtcaagaatggctctcacattgccaagtcagtgggtatttttagtcttcatcttagatgacctttatgcacatttgtctttgtctaggaacttctgttggaaacatcttctattttaatgttattttaaatttttttgcttttgtaacattatgcttagcatgtgtgtccaactctttgacaatttctttttagttttctggtggcttccctttatccaaatttagtattgaaattcctcgagccgctgcttttctcactccataattctggccagaatttggtacttaaaatattttgtctaaaatattacaatagctacttaagtcatctccctgactccactctgttgtctttcagggcgtcgtccacactgtagccaaagtgatcttataaaaacataattctaatcatggcactcttctgcttaaaaatgttttaatggctttccgttaggttaaaatttaaaagtcctttgtagcctgtgagactctacatgagttgactccctagcttcatctttgagcatcttatttctttacttattataccatcagttagagttgattgttatataatccacagaagtgaattctgtccgatttaagcaaaaaaaaaaaaaaaaaaaaactcgag

SEQ ID NO: 79 - DNA, 1061 bp, Homo sapiens
ggcacgagggacattgcccccccgcctgctgaggctgttccttcctgctgcacttgagcagcctcatcttccttcatctcctctcatgttcacttctctttgcctggaccaatggggaaaaaagtgcacagaatgagattatgtgactacagcaattctgagttagctttgattgctctgcagtaaaattaagggaccatatctttctcatgcacatgatatatagtttcaaatatagatctgtacatacgtgatgatgaaaagttcttcaggatgaggatgtatcagagagtgtgaattgaggccagtcttctgtttcctcccaaactcttaacagattgcatatcttcatgcaaatcttttcatgtattccttgtatactacctatagaaaggtgggacttgggagggtcacttacaactcctgtgatcttattttctcctccaggggctccttgaatagagttttcccccattttactggccaaggctgcagttagagctgtggtttgtcctgcaggggatatttgtcagtgtctggagaaatttaggttaacgcgactggagaagtgctattggcatctagtgagtggaggccagggatgctgctaaacaccccgcggtacacagcagaccaaagaatgatctagccccagatgccagtagtgctgargttggaaaactcttaagttagtaaatatacaactgataggaaaaacatgaagtttcaataattaaaaagctttgcacgaaagtttattacagggctgggcatggtggcttaggcctgtaaatcccarcactttggggggccgaggtgagaggatcacttgagcttaggaatttgagacctgtgttggcaacatagtgagaccccatctctaatatatatatatctgggcatggtggctcctgcctgtagtcccagctacttgggagggttgaagtgggagaatggcttgagtccaggaggttgaggctgcagtgagccatgattgcatcactgtactccagcctgggcgacagagcaagaccctgtctccaaaaaaaaaaaaaaaaaaa

SEQ ID NO: 80 - DNA, 1287 bp, Homo sapiens
  misc_feature (1287)..(1287): n equals a,t,g, or c
ggcacgaggcamgatggccaccaccaagcgcgtcttgtacgtgggtggactggcagaggaagtggacgacaaagttcttcatgctgcgttcattccttttggagacatcacagatattcagattcctctggattatgaaacagaaaagcaccgaggatttgcttttgttgaatttgagttggcagaggatgctgcagcagctatcgacaacatgaatgaatctgagctttttggacgtacaattcgtgtcaatttggccaaaccaatgagaattaaggaaggctcttccaggccagtttggtcagatgatgactggttgaagaagttttctgggaagacgcttgaagagaataaagaggaagaagggtcagagcctcccaaagcagagacccaggagggagagcccattgctaaaaaggcccgctcaaatcctcaggtgtacatggacatcaagattgggaacaagccggctggccgcatccagatgctcctgcgttctgatgtcgtgcccatgacagcagagaatttccgctgcctgtgcactcatgaaaagggctttggctttaagggaagcagcttccaccgcatcatcccccagttcatgtgccagggcggtgatttcacaaaccacaatggcactgggggcaagtccatctatgggaagaagttcgatgatgaaaactttatcctcaagcatacgggaccaggtctactatccatggccaactctggcccaaacaccaatggctctcagttcttcctgacatgtgacaagacagactggctggatggcaagcatgtggtgtttggagaggtcaccgaaggcctagatgtcttgcggcaaattgaggcccagggcagcaaggacgggaagccaaagcagaaggtgatcatcgccgactgtggggagtacgtgtgaggcggcactctctctgcttccccctccgctcttgaccctgcatatccaggaaggaactgccagcctcagaggaggcagcaccgagggtgcctgtttgaagcaagcagcatttgggatatgtgcccttcctcagggtctgcttggagcagctcctctgcaggcacagcctggactattcccaggcacagctgtgggcccaggagccagctcaggtgctcccctccaccatgggcaggctgtgcaaaaagcactggcttttctcagcatttgctgctgggcctctcctgggactaccagtgtggctcttacgtgttttctttgctaaaataaaccctagttcttawaaaaaaaaaaaaaaaaggcggccn

SEQ ID NO: 81 - DNA, 762 bp, Homo sapiens
ggcacgaggtgacttcgctcatcacggtcagtcattccttctcctttccagggtgctgggggctggggttccctggcccaagggtccagcctcctctcaccccattccaggtggcatactgcagtctggctctttctcccctccctccccacccaagcctcacctccccaccccttgaacccccatgcaatgagcttctaactcagagctgatgaacaaaagcccccccacccccaatgcctgcctcctcactcctccgtcgctgcccttcacaccttttggtgctacccctccccagagttaagcatggatgtctcctgatcccaggctgggacccctacccccaccccctttgatcctttctacttccacggtgaaaggactgaggtcggactacagagggaagagggacttcccttgactgggttgtgtttcttttcctgcctcagcccagctctgcaaatcccctccccctgcccctcacctccccaggctcaccttgccatgccaggtggtttggggaccaagatgttgggggggtgaatcaggatcctaatggtgctgccctatttatacctgggtctgtattaaaagggaaagtcccccctgttgtagatttcatctgcttcctccttagggaaggctgggatatgatgagagattccagcccaagcccggccccccaccgccaggccatagggcataatttgcatctcaaatctgagaataaactgatgaactgtgaaaaaaaaaaaaaaaaaa

SEQ ID NO: 82 - DNA, 1024 bp, Homo sapiens
ctgcaggaattcggcacgagcttattttacctgtgagttaactaagatttagaaaaaaattcaaggtcacataatatgtgtgactctcataaagactgtcaagccaaagcatgcttttaacctccatgccttaaatctgaaacaccgttagttgacatctctcactgaaaataatcacaacatcgacttcttagaaagataagatacatttgtctttcctgaatatatgatttgcttttgctgttttgtggagatgttccttgttctttgtatgtgtcttctcatgtgtgtctctgtactcacattgctagctgtgcggtctttgtctcccttcctctcatgccagctagtggcatgatggagagactgtggtctagactgaggattatgacagcatacaaaactgactcaacacttacaggtaaataaaatgagcagtggtttcctttatttatttctgttatccactacatagattccatgtggatttaagaaactcaaattcaagtagaaatatctattaatagctattaaccaatcatgcatctcatgtcttaggagattctatcctgtagataaaatgaggaaatcatttattgactgcctttttgggaaataactctatggtctctagaagacatcttcgtttacttcaagtgccatggctttgagtttcattcaggaagatggtccaaaatatgagaatgtgtttattcttttaagatatgtaaattgtttatatcaatatcaacttatcctttttgggagagaaatacataagtagtacttcactttcattagttatttaacattcaaaatctctcaagtcatttaaccaggtgcaatggctcatgcctataatcccagcactttaggaggctgaggcaggaggattgcttgggcccaggagtacgagaccatcctaggcacacagtgagacctcaatctctacaaaawaaaaaaaaaaaaactcgctcgtgccgaaggggggtcccgtacccaatcgccctcacatgcatcgtat

SEQ ID NO: 83 - DNA, 1889 bp, Homo sapiens
  misc_feature (1859)..(1859): n equals a,t,g, or c
  misc_feature (1864)..(1864): n equals a,t,g, or c
gttctgattatgctgccttcacaaaacactctaagtgacctaagtggttatgaagcaaatgcatttatggtgaaaacagtctttgctcattgctttctcttgtttcatttagtgacaaatgatcaagatgacttgattttttttccttcttaacaatgtcttttttatttaaaccaaaggtgaagccagtgtactttctcagtgagttctctgcataaagactaatcagtgggaccaggtaaaaaggtcatataatacattgtggagattgcttacttaatacttctgaaaaatggagtaagggagaaactgtaatgttgcaatatgaacctcccattgggccttccatagggaaagctgtgactactctgaaatggaacctagcattatatccttgtagggtagattataaatcatttccagttcatttctcttagaggtgattacctctagccatcagccttactccatcccatgtttggtatgcaatttgagccacaaggctcgtatcgccaacagctatatacattttgttccatttttctgtcttacagagccatgataraactgtggttagtgagttaaaattcctggagtaactactgtttttctcctttgaaacttaggtttctaaagttgcacctaaggaatctgtcacattttctgttgaatcatggtttttgtttttgtttttaacagatattccttctgatacggacttgaaaattagtgtatggtgacctgtgtttaaaaaaaaaagtacaatacaactacatatagctatatagcttaatgagacttccacccccccccttttttttttttggtttgttgttgttgtagtagtctggtgctggccacatttaagtcttaaaaatttttaaattttgytgttgatgtttgtagacagccctgttgttgaaatcatggctttattcattttatttattttttaaacttgcctgaatttgttctaaaggaatatttaagagacataattttcttctctttaccataacattacacaaaactttttcctaaaacacggttgtgaggtactgatgaggtgtaagtggagctgttaaaaacagcagtgctgtattgyagttatgtatattcgtgtacagtatgtttagatcccaggtaaacatattcttttctgagaggataaatacctgcattcagatattccaggtaaatataattgagtcagggagtagtaaatctgatggagaattcactttggggaggggaaaaagaatagtatgcaagacccttattggcttttaattatacctgaaaccaaaatggatatttttagtctctctgcatgtgagatttggtgtaacaagatagaactataatatatacagtatatggaaggatagatatagtgctttgttcattttaattgcaaagctgccaaaatagttgaagcttaattacttgacttgccttgatttataggactggggcttggagaaaatgagcagatgttcctctaagacatcgattacagaagccttatatacatggatttgattttgtatttgtagctgaaagtcactgttgtctaaaactaacttttctaagttatcaaaacaacctaatttcttttccaacaaggagaacttaatggcatgaaggattgtgtgacacattggaaaagccagcttactgccactctcttcctttggccattagagggaggtgttgcctttcattgacgcttagaagcaaattgttcacttgttaagaaaagtaaatccttaaaaaaaaaaaaaaaataaccaatttttcttaatacccagaagggattttactcaatatttccctaggtaaggaaagggggggttatnttccncttaaaaccccaccgtgtattacaa

SEQ ID NO: 84 - DNA, 874 bp, Homo sapiens
  misc_feature (79)..(79): n equals a,t,g, or c
gccttctgaaaaaggtgcttgcttcctcttcaccttctgccacgattgtaagtttcctgaggcctccccagccatgcanaactcacgcactcctggctttaaagtttatacttgcatttgccatacctgataagccacggcatatccagatgaaactagccagactggaatttgagtctttggaggcactcaagcagcagcaaatgaagctcgtgaccgagaacctgaaggaggaaccaatggaaagcgggaaggagaaggcaacctgagtgcccagcgtgcccagctgccctgttggcagaggcctgtgtctgtgccacacctgccacggtggcaggggggtaccggggcagcatcgtggctcctgaacccagacccaatgcttagccaaacgaatggctcccatgtggcaagcacccttctcagtttcgcagtggcttggctcgggatccttggcagttcccccagccccaccctgtctgctccttcccagttccttcccgggccccacacgctgctccagctgccaactttgctgcagagccactgccgcccttgagcctctcaccatgagtgagccaccagctctccacgttcccctcatagcagtgtcactcccaaccccaccatggcccagggacccgtggacaggttggggatggggtgtgtgcccactgtgctcatcacaggagcctcagttgagagtgagcggggtacagtaaggcagtgcttcccacactggacctctttcctggttctcttttgcaatacattaacagaccctttatcaacataaacaatagtaactgagctattaaaggcaacctctctgacwaaaaaaaaaaaaaaaaaaaaaaaaaaaaagggcggccgc

SEQ ID NO: 85 - DNA, 2174 bp, Homo sapiens
ggaattccccgggggaatgggccactgattcatttcgtggttaactggaatactgctttttaattgatacccagctgtatctaaatcattacaatactggacagatagtgtagtgcagagtatttgaaatgcagtgctttgtttggcaaagatttatttaatggtttcattttctctgcaagaagaaaaaaagcagatcatcgaagctcttattatttgcactgtggcagattcacttgagttcagaagcctagggaaaaggtgggacttttgaaactagggcagtaggtaaatgtggacacaccttcgtttgtatttgattagggatctgacagcgtgcatatgtgtacaggtttgcacgtgtgcatacacacatatacaaatcatagaaaaccataggtgttctgtgagagagaaaattttgctacttaaatacagcgtgaattctcatcctgatagttgcagaaaatatttcttttaaaatggagattaatgtctaattccatataaagaagattataggaaaggtgatttaaactgtaagtagctttgttcactaaaacgctagatttatttgaaacagtgttttatttcttttggaaggcagacaactagtttaatagtgtacatatgaaacgctaatttggcttgttaattggatgcaattaaattgaggttattttatactgcttaattgttagaaaattacatgcgttgccatgcctgtgtaatgtgaagcaaaagcgaagggtatagcaggagtgggggtgggagggacgcaagatctagtcctgtctttgcaattaactttctgtgaaaacttggaaacaagtcatcgaagctctttggacctcatttggaaatggaagagattggaacagatggctcctaaagcttcttccagctcatattctatcagtttataaattctactttgtagttgtagagaatgcaatgtcattatattctgtaattatggtattacaaggatgaactaaacacttaaaaaaatcagcacagtgccaatttagcaaatccgttagaaggaaggcaatttaggcttaaagagcactcacctgtgccaggctccatcccaggctctctctccacattacgtcacttagccctcacaaccaacctgagaagatttagttttttatcttgatgtgtatacttaaagaaacttccattcggaaaggttttgtggggatgctttgctagtcattggtgaagcaggattcgaactcagggttctttggctccgaaaatgctttgtctttttacccatttcacgcagtataagcaattgtttacacatcaaaattatttcaaatatttaaaaaaggccaaccatatttatcacttagcacaatgtttccccttagtagtatatggataaacaggtagcccacgggattaagaacctcgatttgaagtcagacagaatagggcaaattccagctccaccaccacctgggggaatttgggtatgttacttaacctccctgaggttacaaaatgaggataatacccattcaagagtcattgggaaatttttatgagaatgtttgtacccatctcaatgagcacatagtaaacgtttaatacctggtagctatgggttattattaacaaggtattagactataagaaaaacataggacaattcaaattgttgtgacagtaaaatattaaatattttcaaatggtccattaaactcttgactgaaatggtttaagaaacaatgttagaatgacatggtttcacatttaacagttaacaaatggaaatatcaattaaaatctggggtgtttctcactgagctcagccagtgctatgccaatgaagtgaactaaattctctggttctttgtggaaaatcattctgaagtttttgctctaaaaatagcttttggggcctgaattaccccttaccccactcgaacttctgtgcaagagccagaggaccagtgattactcgtggggcccttgggcctacttaagagactcaacttgggtgttcacaggactgttgactttaattctaaaaaaatttattaattcaacagagatttattaagcacctgctctgggaaagggctgttctagacactggagatccatcaatagacaaaaatagtaaaaaaaaaaaaaaaaaactcgagggggggccc

SEQ ID NO: 86 - DNA, 1282 bp, Homo sapiens
  misc_feature (907)..(907): n equals a,t,g, or c
ggcacgagccttacccctctgctggcaagaggggacctgattcatcctcacgctaaacactcattctacccaactgattgagacagaacagaagataaactgaaacttctctgccttcccgctgcaagagtgaatgagcgatccctctcaactgactcaaaatgtttgcctcacccaggagatggagctctcgaaggccttctctggccagcggacactcctatctgccatcctcagcatgctatcactcagcttctccacaacatccctgctcagcaactactggtttgtgggcacacagaaggtgcccaagcccctgtgcgagaaaggtctggcagccaagtgctttgacatgccagtgtccctggatggagataccaacacatccacccaggaggtggtacaatacaactgggagactggggatgaccggttctccttccggagcttccggagtggcatgtggctatcctgtgaggaaactgtggaagaaccaggggagaggtgccgaagtttcattgaacttacaccaccagccaagagagaaaatcctatggttatccctgggaacgcagatcacctacatcggacttcaattcatcagcttcctcctgctactaacagacttgctactcactgggaaccctgcctgtgggctcaaactgagcgcctttgctgctgtttcctctgtcctgtcaggtctcctggggatgtggcccacatgatgtattcacaagtcttccaagcgactgtcaayttgggtccagaagactggagaccacatgtttggaattatggctgggccttctacatggcytgctctccttcamctgctgcatggcgtcggctgtcaccamcttcaacamgtacaccaggatggtgctggagttcaagtgcaagcatagtnaagagcttcaaggaaaacccgaactgcctaccacatcaccatcagtgtttccctcggcggctgtcaagtgcagcccccaccgtgggtcctttgaccagctaccaccagtatcataatcagcccatccactctgtctctgagggagtcgacttctactccgagctgcggaacaagggatttcaaagaggggccagccaggagctgaaagaagcagttaggtcatctgtagaggaagagcagtgttaggagttaagcgggtttggggagtaggcttgagccctaccttacacgtctgctgattatcaacatgtgcttaagccaaaaaaaaaaaaaaaaaaaaaaaaaaaaaactcgagggggggcccggtacccaat

SEQ ID NO: 87 - DNA, 1523 bp, Homo sapiens
ggcacgaggttgtcttccatggcctgtttctcctgctgtctgggtgagtgagcctgcaacgcaatgcccatgagagtaaatgcctcctgacctaccctgctcagcactgttctagtgtcttggccttgaaagaaaagcctgacttcctgctgacacatgtggtaggggcatggcagctatgaggcacctcctacgtctgttttctggctgtggtgacttgggatttttaaccttatatatctttttcctttactcaaaacaaaacaatttttagcacactgaaaaaaaaaaaaagccaaatgttttgtgcctttctaaggcagcactgtatcccaggctgcattttaggacttaatatggaaataccagagtctgagctcctctaccttgagtttcattagtccttagtgtctaggagacaggaaagaatgctctctgtgactggagaggtgacatgcaggtgcagtgtgtctggagtccctttcccctgctgtgagacttcagtggaggagagaagcattgtaccctgggatcatttggttggttccaatcacaagcttagttatcaggttgcatgccttgtctcctgcaaaagacagaatgtttcacaattcccaggtaaactctggaccattccaagtgtcctagccttctgatgacattaattacctagttgtgtcgaggagtataggatggactctcctgagaaggggaggttggtggctttgtcttttctttttgctggatcctgaactggtctagacctcctgcccccaccccccagcccccatcagatgtggctggcctttcatttgaaggcttcagacttaaagcattaagcagctagtgccctctgcagggcctggtttccccagggaagggcagcaaggaacatgggaccagaagcctgtcctcagtaatgtgactatagtgagctttagcaaaagtttttctatataatgacatcttacttatcttttaccctttcctcagttttcccctgcctttaactaataaagaattgggagacagaaattttaaagtcctccttattcaagattttgaaattcttagcctgggagtgctggagagaacctgatgctttctccagaatgaagagtcccaatttgtatatcagtgttaagaagaaaacaaaacaaacacataggtgagattttcgtggactattttaaaaatgtgtcattaatataaaaaatttatattagcagtatttaatcattctcacctgtaaagaataagaaaaacagaaggtaaatattcttacagagaatagcagagctttaagattcattttcattttaagtccattttattttgccagtgtattaatgtttagaagtctgttttactaatgttatttattaattttttttcatttccatacacagttagttaactaaagagctttttcaagcacccatgtctgtaaaaaaatatttttaaataaagtttcttttgttgtagcagaaaaaaaaaaaaaaaaaaaaaaaaaaaaaaaaaaa

SEQ ID NO: 88 - DNA, 1768 bp, Homo sapiens
cgcggtcccaacccttccccatggccgaccctgaggagttgcaggtttcttcgccgcccccgccgcctccctcttctccctcctcttcagacgcctctgcagcatcttccccgggcggcccagtgagtttgggctggccagttccgagcaggagcagcggcccaacggtggaccagctggaggaagtggagctgcagatcggagacgcagccttttcattaaccaaacttcttgaagccacatctgcagtatcagctcaagtggaagaacttgccttcaaatgtacagaaaatgcacgtttccttaaaacgtggcgggacctcttgaaagaaggctatgattctttgaaacctgatgactgatttggcatacttcgttgtttaataatgactgcaataattcatacttcttatgtcatattttgtacatgtaccacacatataggatgacctctgtccagcagttctgtatatactcagaatgaaatttttcttggttttcttggtttttgtgaaagcagaataccgatgctatttttgttgcggaccagtacttgtttgtccttaaatactttatgcctctgaactttcatagaatcctttatgaaagttaacttcatcaatagacggttaatattaatagagccacagtgctaccagtagcaaactaggtagaccattatttgttttgcaacaagatgctaagcatggcagactttgaagttgcgtttcatcttaaggaccaagggaggtaactttaaggttgccagtggtggatccagctccgttaggctaagttgtctacagctaatgattgtgtctttattctatatccccagcacctaaaacagggtcacacaacattcactaaatgtttgttgaataaaagagttaacaaacataattgaaagctttttttcttcctatatttagcatgaagactgtcattgtttctctaggaaatgtatgaatctgaacttttttgacttgaagaaaaacattctttttttacagagatttggactttgatgataggttttaaaaatatatgataaatattttttgtacttgtttgatttttttttaaagactttacttcagaaagggaaagactgtttagaaagaatgcatattttttccctatttatttctgtggttactgcttttgcagtttaacagtgtttgtatttgatatttgtatatgtttgattgctatctttaaagtgccttatcagatttatggctctgtgctattactttttgagctttgcaagttgtgtacataataattctaaagaagttactttgtttgcaatgcatcaaatttaaatgatgtgattttttttgtattatttgatcttagtgacagtgttctattttgcatcctgtatcttatgttgcttttggtgttttgtgttgtgtgtcaacgattaagccaactaattctctaccatatataacttctggacatttttgatacaacatcttaattctttgtagatatggagataggtacagaactatattctaatgccccacaatggggctatgagaggggacagatggatgggcaaagaatagttttgtttaacatattaggtcatagttcttgattagtttttttagttaaagataaacacatagggtgtgatttctataccaaagatatgcttatttcagtattagaaaaatattcttcttacatctcctgaaaattgcaatttttaaaatgtgtaaaaataaattattattaaaagcaaaaaaaaaaa

SEQ ID NO: 89 - DNA, 1131 bp, Homo sapiens
gcaggatcacagctcacggcagcctcaacctccctggctcaagcgatccctcccctcagcctcctgagtagctgagactacaggtgagtgccaccacactcagctaatttttaaattttttgtagacagggtctccctatgttgcccaggctggtcttgaactcctagactcaagtgatcctcctgtcttggcctcccaaagtgctgagattacaggtgtgagccactgtgcccagcagtttcccagaatatatttaaatgcaaagttacatgaggggaaaacatgtatgtttgctcctgttgttactgggtaggttctgaacagcagaaacccatgtgcagggtgggctggtgaaggcccctctccgcaaggtggtagcaggaaaaggtccttgacttgatgaatttggtctgcctctgagccactggaggaagctgttttgagccagggttttttggcctaaagccagcatttcctcagtctccctttgtggttcgaaggatatggactattgcaatacatttcttccttcaaatcctgccactgttttgttggcccacaactaataggacctcaaaataagccatgctgctttgcacacacactagccttcttttgtacttttcattctggatgggcttggccaaaacaggctcaggccaaagacctcccaagctgtatgtacttccagtatcctgaaacagtgtttggtgacataatgccaagggtaaacaagcctgatttaggcactgctttatccaggggcttcacccatgaaattaataaaacttatctgagtcacttgaaacttggttcccagaaaacacatttctggtttataatctccttttatgctcacctgacattaattatctatccttgatgatgtgtttaaactgagtagcagaaaacagaggccacactttctgggaaattttaaaggaagaaaccatttttaatgagatgaaaatatttaacgaatttaaaaagctaatgacaattttgagaaaaggtttgggatgtatattgctatgtaatttaataaactgattttatggatataaaaaaaaaaaaaaaaaaaaaaaaaaaaaaaaaaaaaaaaaaaaaaaaaaaaaaaaaaaaaaaggtgc

SEQ ID NO: 90 - DNA, 1915 bp, Homo sapiens
  misc_feature (490)..(490): n equals a,t,g, or c
  misc_feature (1899)..(1899): n equals a,t,g, or c
ggcgaagaggggcgsaackcrttgcgttttgagtctcgggacccctgttggagagactatggcgctcaacaagaatcactcggagggcggcggagtgatcgtcaataacaccgagagcatcctaatgtcctatgatcacgtggaactcacattcaatgacatgaagaacgtgccagaagccttcaaagggaccaagaaaggcactgtctaccttaccccttaccgggtcatctttctgtccaagggcaaggatgccatgcagtccttcatgatgccattttatctcatgaaagactgtgagatcaagcagcccgtatttggtgcaaactacatcaagggaacagtgaaggcggaagcgggaggtggctgggaaggctctgcttcctacaagttgactttcacggcagggggcgccattgagttcggacagcggatgctccaggtggcatctcaagcctccagaggtgaagtccccagtggagcctatggntactcttacatgcccagcgggscytatgtctatcccccgccagtcgccaatggaatgtacccctgccctcctggctacccctatccaccgcccccacctgagttctatccaggaccccccatgatggacggggccatgggatacgtgcagcccccaccaccgccctaccctgggcccatggaacctccggtcagcggccccgatgtcccctccactcctgcagccgaagccaaggccgcagaagcagccgccagcgcctattacaacccaggcaatcctcacaacgtctacatgcccacgagccagccgccgccacctccctactacccaccggaagataagaagacccagtaggccctcctgcctccctgcctcccaccctcatctctctaccctacccctcccatcggggctgtgctggggcttggggaggggagggggcgccttgttctccctccaggtctgatcataaacaattaccaggaactagcattgtgggacattagggcccccggcctcgggagaggtgccgcccagcttcccatgccagcccggagcccacagtgctgcccagcgtacctccctcaccgtctggggctcttctgggagcacggagcatcccctgttcctgtttcactctcagcttctcccctcgaagggactctctggccacctcctccaccgcagtccagctccctcagtctggcacccactgctacactcagcctcatgagccacttcagaccagccaggtgtcttcccgggccctgccagaccctgctcacattccctctgctggtctgtgctggtctcagaaggccaccgcgcccgcattccactcagccagggtccagctgcagcccccgccacccttccttcccttccctgtcctgggtcatgttgttgccaccctgtgtgacttttgaagctgtaaaatgagcttccagggcttgggtggcgtcggggcagggccgccgaggctgggaggaagcccttctgccttttgctggtgtttctggaatttgctttccctcacctctcacttccttctagaaggagcttcctgactggaaccagagaatgcatgtctgtccacttggtggctgctgggtggggccgggaacaagggcccctgaccctgtgtgctggccgggacctgccaccagccccccagcctgcttcttccccttaagctttgtgcccctggatgcgctaacattcactcttgtttgtccctggactggccatgaagtgaggagatggttatttaaagagaattccctatttatttgacaaaaaatccagttaatatattaatgtgaaataaaccctgtttgcacctcgatttgtttgctgaaaatgtgaaatagtaaaaatgaaataactggaaaaaaaaaaaaaaaaaaacncaagggggggcccggt

SEQ ID NO: 91 - DNA, 1160 bp, Homo sapiens
ggttgggtcaaggtaactctgggctacagagtccttgctgggggttcggggagcgcttggaccccggcttctgggacgcgtcaggagaagggagcactggctttgctttcatcaggccaaagatgcctttytttgggaatacgttcagtccgaagaagacacctcctcggaagtcggcatctctctccaacctgcattctttggatcgatcaacccgggaggtggagctgggcttggaatacggatccccgactatgaacctggcagggcaaagcctgaagtttgaaaatggccagtggatagcagagacaggggttagtggcggtgtggaccggagggaggttcagcgccttcgcaggcggaaccagcagttggaggaagagaacaatctcttgcggctgaaagtggacatcttattagacatgctttcagagtccactgctgaatcccacttaatggagaaggaactggatgaactgaggatcagccggaagagaaaatgaagaccccagagacatttattggggagtaggatgtggctgagtgctttttttttggccagactagcggattcagtcctggaagagagtatcatataatgagacccacaggcactggcacccttgggttggcaatagaaggtgacatggaatggagaaaaccaagattccagatggggatagtaactagaaggtgcttcagatgcactgcctgcgggtgccagtctgaaaaccagaccgcacagaggcctggggctgctgatgagctttttggtgctctccacacacaagctcgcaaacacacatgtcccagaatagctctgttgggttgtgttgggagaagcggctggagttcattctctcacccccttatgttggtgtttggcgtgtgacagcagttctacagagctctgtgttggggtcatggatgagcggctctcttggctcttaaaggcaggcctctctcttcttgcctttaaagaatcctccttcctcacacctggcctcctctggcttcagcttctcagcagcaagcaccagccttccacaacaacactatatttttatgctactttcctgtttgcactactacttttttattaaacgatgttaaataaaaaaaaaaaaaaaaaaaaaaaaaaaaaaaaaaaaaaaaaaaaa

SEQ ID NO: 92 - DNA, 1594 bp, Homo sapiens
  misc_feature (1090)..(1090): n equals a,t,g, or c
actcgtgccgaattcggcacragggaaactttggaagttcattcttaaaaattttataagtaatatatgagtacgtttttatgggatattcaaaccacctactgtttttaggtcttactctcttrtgwtgcagctgttgctgatccctgtagagtaaagtacacactgaaggctatggcaatgatctaccgttccagcttcctctaggaagggagtttgacaaataaaatgctagtgaactggagcacagtgagcaagggggaggtggcatgagctgaggacacagtgggcaggccagaacacacaggcctggacatcacctcaggaacttgcatgttatttggagcataatggaaaaccattagaaagttttagggagtggttatgatttcatttatttatattttataaagatctttctggttattcggtgaatagttatggttaaaccagttcaacccagtgacagtacctgtcacatagagttattgtgaggattggttgagatgtatgtgatagattatctggcacaaagtaagggccccctcaatattgtttttctctcaagtgcacccaaattggggtattggaaacacttcctccgtagtttggtagaaggcaccaaatcactagggctgataccgtttgagtggggccccagctgatggggcagggggtaaaggggtgaggggcttaatatgaggcagaaggaagggccaggcctctagaactcatcccaagccggccccattctctggctccctgtacatcctgcctttccatagaggaagccagtcccaggggtggctgcatcttattccatgcttwacatctcatcagccttgctgactttccccagcctgctgtagatcagagtgaaatctgtttttcctgtctagagcaagcgcactttttcctgaggatttccaaatattttgaattcccatatgcagtggaagccgaagaagctggagggagagtggggttgggaggtgcagaggttccatgtcttcttgcctttatgaagcttctggcattgtgctgggtgcaggtgatccatggaataagatggatgtggttctagtgacgnttcacatcacgaaggaccatctgtgtcctcttagggagtctggctttcctgctaagggcaacaggaaggcattgtagggtctgtgccaggataccaagtgaaggaagagatttccttactgtggacttgcagacgataagtaaacttttgggtcataagagaccatctcttggaagctgaagaacttaggccaaggttttcctgagaaatctagttttgcagaatgttgtgaaccttgatgctctggtgacagtgaattaatggtttattttaggaagcactacacaattttacttaagagtgaggctagaaagttgagctgtttctcaccttttataaatgaagtttaagatcagattaatctccatggagtttttagctcaaagcacaattagttttctatagaaagggcttgggctgaaccaaattatgccattgatctgcctggtagacatacaaatcattctgttcttagaaaaaaaaaaaaaaaaaaaaaaactcgag

SEQ ID NO: 93 - DNA, 2078 bp, Homo sapiens
aattcggcacgagcccacacctgctgcccaccaccccggcagcacctttccctgcccaggcttcagagtgccctgttgctgctgccactgccccccacactccagggccatgtcagagctcccatctaccctccaccagcatgccgctcctgaagatgcccccaccattctcggggtgcagccacccctgcagcgggcactgtggtgggcactgcagtgggcctctcctcccacccccgagctctcagccactccctagcactcacagggatcccgggtgcaaggggcacaagtttgcacacagtggcctggcttgccagctgccccagccctgcgaggcagatgaggggctgggtgaggaagaggatagcagctctgagcgaagtcctgcacctcatcctccacccaccagagagatgggaagttctgtgactgctgctactgtgagttcttcggccacaatgcggaaaaggagaaggcccagttggcagcagaagctctaaagcaggcaaatcgtgtttctggaagccgggagccaaggcctgccagggagaggctcttggaagtggcccgaaccgggaactggatcgggtcaacagcttcctgagcagccgtctgcaggagatcaaaaacactgtcaaagactccatccgtgccagcttcagtgtgtgtgagctcagcatggacagcaatggcttctctaaggagggggctgctgagcctgagcctcagagtctacccccctcaaacctcagtggctcctcagagcagcagcctgacatcaaccttgacctgtcccctttgactttgggctcccctcagaaccacacgttacaagctccaggcgagccagccccaccatgggcagaaatgagaggcccccacccaccatggacagaggtgagggggccccctcccggtatcgtccccgagaacgggctcgtgaggagactcaacaccgtgcccaacctatcccgggtgatctgggtcaagacacccaagccgggctaccccagctccgaggagccaagctcaaaggaagttcccagttgcaagcaggagctgcctgagcctgtgtcctcaggtgggaagccacagaagggcaagaggcagggcagtcaggccaagaagagcgaggcaagcccagccccccggcccccagccagcctagaggttcccagtgccaagggccaggtcgctggccccaagcagccaggcagggtcctagagcttcccaaagtaggcagctgtgctgaggcttggaagaggggaagccgggggaagccggccaggaccaggttgggctggcagtcccaaaactgagaaggagaagggcagctcctggcgaaactggccaggcgaggccaaggcacgggcctcaggagcaggagtctgtgcagcccccaggcccagcaaggccacagagcttgccccagggcaagggccgcagccgccggagccgcaacaagcaggagaagccagcctcctccttggacgatgtgttcctgcccaaggacatggacggggtggagatggatgagactgaccgagaggtggagtactttaagaggttctgtttggattctgcaaagcagactcgtcagaaagttgctgtgaactggaccaacttcagcctcaagaaaaccactcctagcacagctcagtgaggccctgcccaggctgagctgcttcagggcatcctgaggccctgactgccagctgaaggcgtataatttttccctccgtgtgccccacctacccgtccaagaccctctgtgctccccaccatcctggaccaaccaaaagctgaacggatgccacactgtgctggggccccttgacctcagcagagccgcttcctggtgctacgcagcctccacactcagagcccgtggactgggctggcctaagggccagggctgatggtactgctggcccaacactgctctctttgtgtttggtttttttgtttttgtttttattttgtttttttccaattctttacttttgatactgtgaagatctttcgtgccgaaagataaagcaacatttggacacagaaaaaaaaaaaaaaaaaa

SEQ ID NO: 94 - DNA, 1992 bp, Homo sapiens
gcatcctccgccaggacagagtctccaaaggctgctactccttcatccacctcagcttccagcagtttctcactgccctgttctacaccctggagaaggaggaggaagaggatagggacggccacrmctggkacattggggacgtacagaagytgstttccggagtagraagactcaggaaccccgacctgatccaagcaggctactactccttcggcctcgctaacgagaagagagccaaggagttggaggccacttttggctgccsgatgtcaccggacatcaaacaggaattgctgcgatgcgacataagttgtaagggtggacattcaacggtgacagacctgcaggarctgctcggctgtctgtacgagtctcaggaggaggagctggtgaaggaggtgatggctcakttcaaagaaatatccctgcacttaaatgcagtagacgttgtgccatcttcattctgcgtcaagcactgtcgaaacctgcagaaaatgtcactgcaggtaataaaggagaatctcccggagaatgtcactgcgtctgaatmagacgccgaggttkagagatcccaggatgatcagcacawgcttcctttytggacggacctttgttccatatttgggatcaaataasgagatgggtctagcaatcaatgatagctttctcagtgcctccctartaaggatcctgtgtgaacaaatagcctctgacacctgtcatctccagagagtggtgttcaaaaacatttccccagctgatgctcatcggaacctctgcctagctcttcgaggtcacaagactgtaacgtatctgacccttcaaggcaatgaccaggatgatatgtttcccgcattgtgtgaggtcttgagacatccagaatgtaacctgcgatatctcgggttggtgtcttgttccgctaccactcagcagtgggctgatctctccttggcccttgaagtcaaccagtccctgacgtgcgtaaacctctccgacaatgagcttctggatgagggtgctaagttgctgtacacaactttgagacaccccaagtgctttctgcagaggttgtcgttggaaaactgtcaccttacagaagccaattgcaaggaccttgctgctgtgttggttgtcagccgggagctgacacacctgtgcttggccaagaaccccattgggaatacaggggtgaagtttctgtgtgagggcttgaggtaccccgagtgtaaactgcagaccttggtgctttggaactgcgacataactagcgatggctgctgcgatctcacaaagcttctccaagaaaaatcaagcctgttgtgtttggatctggggctgaatcacataggagttaagggaatgaagttcctgtgtgaggctttgaggaaaccactgtgcaacttgagatgtctgtggttgtggggatgttccatccctccgttcagttgtgaagacctctgctctgccctcagctgcaaccagagcctcgtcactctggacctgggtcagaatcccttggggtctagtggagtgaagatgctgtttgaaaccttgacatgttccagtggcaccctccggacactcaggttgaaaatagatgactttaatgatgaactcaataagctgctggaagaaatagaagaaaaaaacccacaactgattattgatactgagaaacatcatccctgggaagaaaggccttcttctcatgacttcatgatctgaatccccccgagtcattcattctccatgaagtcatcgattttccaggtgtgggtgaactgcctgtgactcctctcctcccccgcccctacccctcagggataatgagttcattgctgggctagatgttttagccatgattctgcctctgttttatacctgcacacgtccttatctttgttacatatgaaatatctgtatcacgggtatattgagagaaataaaggtgagagcattcacaaaaaaaaaaaaaaaaaaaaactcgag

SEQ ID NO: 95 - DNA, 1973 bp, Homo sapiens
ggcacgagcgtcacttccggcttccttcagtccgctggtcccgagcacgagctgtgaggggattcacttgtgtgcggaactcctcggaaccatggcgtccctttcccttgcacctgttaacatctttaaggcaggagctgatgaagagagagcagagacagctcgtctgacttcttttattggtgccatcgccattggagacttggtaaagagcaccttgggacccaaaggcatggacaaaattcttctaagcagtggacgagatgcctctcttatggtaaccaatgatggtgccactattctaaaaaacattggtgttgacaatccagcagctaaagttttagttgatatgtcaagggttcaagatgatgaagttggtgatggcactacctctgttaccgttttagcagcagaattattaagggaagcagaatctttaattgcaaaaaagattcatccacagaccatcatagcgggttggagagaagccacgaaggctgcaagagaggcgctgttgagttctgcagttgatcatggttccgatgaagttaaattccgtcaagatttaatgaatattgcgggcacaacattatcctcaaaacttcttactcatcacaaagaccactttacaaagttagctgtagaagcagttctcagactgaaaggctctggcaacctggaggcaattcatattatcaagaagctaggaggaagtttggcagattcctatttagatgaaggcttcctgttggataaaaaaattggagtaaatcaaccaaaacgaattgaaaatgctaaaattcttattgcaaatactggtatggatacagacaaaataaagatatttggttcccgggtaagagttgactctacagcaaaggttgcagaaatagaacatgcggaaaaggaaaaaatgaaggagaaagttgaacgtattcttaagcatggaataaattgctttattaacaggcaattaatttataattatcctgaacagctctttggtgctgctggtgtcatggctattgagcatgcagattttgcaggtgtggaacgcctagctcttgtcacaggtggtgaaattgcctctacctttgatcacccagaactggtgaagcttggaagttgcaaacttatcgaggaagtcatgattggagaagacaaactcattcacttttctggggttgcccttggtgaggcttgtaccattgttttgcgtggtgccactcaacaaattttagatgaagcagaaagatcattgcatgatgctctttgtgttcttgcgcaaactgtaaaggactctagaacagtttatggaggaggctgttctgagatgttgatggctcatgctgtgacacagcttgccaatagaacaccaggcaaagaagctgttgcaatggagtcttatgctaaagcactgagaatgttgccaaccatcatagctgacaatgcaggctatgacagtgcagacctggtggcacagctcagggctgctcacagtgaaggcaataccactgctggattggatatgagggaaggcaccattggagatatggctatcctgggtataacagaaagttttcaagtgaagcgacaggttcttctgagtgcagctgaagcagcagaggtgattctgcgtgtggacaacatcatcaaagcggcacccaggaaacgtgtccctgatcaccacccctgttaagcattcccacgtgctgtcgatctttggaccagtttctagcaaagttgtgtttgaaagatactctattaaagaagactgtggaatctgtttatcggtgcccattatatccttaagtttggatatttagctgaccttcgctttaacataggtctaatttatttgccgtgtcattttccatacaaatcagttgatttaaaaaagttcatttctcatactgtgcattaaaataaaaatttgaacaattaaaaaaaaaaaaaaaaaaaaaaaaaaaaaa

SEQ ID NO: 96 - DNA, 1117 bp, Homo sapiens
ggcacgaggagaactaagcattaggagaagcagcatggggctcaacagtgaagtgacttgttccaggcgggtcctcaggagtggctgtgcagccccagtcacttttcatcacaccggagagggacgcacaaccccagtcctgtttagttgcagatataccgagaagggagagcccacaccgaccttaaggtcacttgggccctgaatcctatgcctctcgttccactgcttctcagttgccctcctacctggctggccaggtttggagtctctctcccctgctctggcattccagtcttggcctgaagcacgctatgcctctcatacagtctgccttttctagggtccaagcagcatcccaagttctgttgagatgcagcttgcagtccaggaggacaacggtcacccccatcttcccatgtttttcttgctttaagccctcccctaagctttcacatataatcaccaggggttcagaaattgtcagccagttctccttatgctttaagtagattttcttggggccagatgtcttgaaaaacgctctcctgactcagcagttcctggaatttttggcctatcatttatctcactgttctgagtttacttgtaagcctcttggcttaatgtttgaatcaagatgagcagtaataacagcttcttgtgtaccaattactcagaactcacttaaattgccttaacactttttaaatgttcttacacatttgaaattctttagggagggatttccagaactttcctaaatttctccacccatggcatgacagtacttagaggggcaagaagttcaattttagaataagctcttctgggcgcgatggctcatgcctgtaatcctagcactctgggaggccaaggcgggtagaatgcttgagcccaggagtttgagactagcctgcaatatgcgaaaccctgtctccacaaaaagccagacatagtggtgcatgcctgcagtcccagctacttgggggcgctgagttgtgaggatcacctgagcccaggaggcagaggctatagtgagccacgatcgtgccactgcactccagcctgggtgacagggtgagacgctgtcgtctcaaaaaaaaaaaaaaaaaaa

SEQ ID NO: 97 - DNA, 1827 bp, Homo sapiens
  misc_feature (601)..(601): n equals a,t,g, or c
  misc_feature (918)..(918): n equals a,t,g, or c
  misc_feature (1825)..(1825): n equals a,t,g, or c
gaattcggcacgagatttattattatttaactcctgcagtgagcaaatgtgagtaacatttgaatgaaaataaattttcagcttatttacatgaggtaataaacttgactttatcaagtaattgtgggagtggggaataaacctcatctggggatgggaaataaacaccactataaagaaaccactaagatttgaatgccttgcttgttttaagtttgttgatgcaggtattgcattgattatgcatcagggaactggaaaccaaggcattcgttcttttaagaaaatagattcttaagcataggagtctcatgttttaagaactatttctaagttcaactaagatcgagtttttctgtctctattggcaaktwtyaagaggcataaactttaaagaaaaagggaaaatgtgataaattaatggaatagactccataggcttttattccaacttttatatgatgcaagtctatgtgcttctgtctgactcacttatttctgtwatcaagatgaactagtgaagggaatttctctctcaatgctaaattaattacatgcattggggatagtcatccagagagagggaaggtgaccttctgangttgtcacycagwaaataattgcctgagctgagaatggcatgtgggtcacagaattggtgtttctggatttaggaaatacttcctattttttttccactcctgctggctaagccaagaatggcaaatatgtgttcatgctgctgcattcccttccaggcccataaggacgttggcaatccttcatagccttctcacaggcggaacctggattaatttaagaacccttttgtgcctggcttttcaggaagccagtaccaatcaattggtgctggcatgaagcatgaaactatttgccatctctgagttatgccagtanaattggcatgcttctggtttccatgcataccactacctttcatgggttttattgtgcacaaactttgcatgcctttagaatgatatacctacgcaggtatataatttgtcaccctgatccaaaaagggkaagawgccmagaccatagtgagcctcttattagaaagctcttggcttcagtttttgacacttccctgactctttatattcacgttatcataagctgccaaattcttgactctataaattgccctttaacagcttattaggaattccaactactgtattctagcaccaactacagcatattcagagcctctgcaattcctaaaagtacacttaaaccaaatacatgggccagcctgcatcttttaaaatacattttatgcctttacacttcgtattaagttgggtgagaattatgttttaatctacactctatcttgaattgtcttacattttattctgcttaccagggttcaggttcttatccaaaatgaagttaaatttttttctcttagatagttgcattcctgaagcaattagaacagcatgatcccttggtgtttattgacattctcatcattgtctcattggctttaggtttaacatgcctcatgatgacaacaacaaatgtaaagaagaaggagttaagagtccccagcatgtcatggctccaacactgaacttctacaccaacccctggatgtggtcaaagtgtagtcgaaaatatatcactgagtttttagagtaagacttgaacattcttttagcacaaacttctagtgcctggcctacatgtagtgaactaattgtgggaaagacaatatgaagtcaaacattccttttgagttatttttgttgacattccttggagaaggcaaaaaaaaaaaaaaaaaaaaactcgnag

SEQ ID NO: 98 - DNA, 2731 bp, Homo sapiens
  misc_feature (579)..(579): n equals a,t,g, or c
  misc_feature (1532)..(1532): n equals a,t,g, or c
  misc_feature (2362)..(2362): n equals a,t,g, or c
gctggggaaggtgcagggggcctgggagactgcctctccgaagcggtgaaaccctcacccttccgtccctcccagccaccctccctaaaacttcccctgacagagggtggcagccccaggctctttgcataatcctgtggcttcgctgtcttcacccagcaccagcggacagggaagggcagagaaggccaccatggcgacactcctctcccatccgcagcagcgccctcccttcttgcgccaggccatcaagataaggcgccgcagagtcagagatctacaggatcccccgccccaaatggccccggagatccagcctccatcccaccacttctcccccgagcagcgggccctgctctacgaggacgcactctacactgtcttgcaccgcctgggtcatcctgagcccaaccatgtgacggaggcctctgagctgctgcgatacctgcaggaggccttccacgtggagcccgaggagcaccagcagacactgcagcgggtcagggagcttgagaagccaatattttgtctgaaggcaacagtgaaacaggccaagggcattctgggcaaagatgtcantgggttcagcgacccctactgcctgctgggcattgagcagggggtargtgtgccagggggcagccccgggtcccggcatcggcagaaggctgtggtgaggcacaccatccccgaggaggagacccaccgcacgcaggtcatcacccagacactcaaccccgtctgggacgagaccttcatcctggagtttgaggacatcaccaatgcgagctttcatctggacatgtgggacctggacactgtggagtctgtccgacagaagcttggggagctcacggatctgcatgggcttcgcaggatctttaaagaggcccggaaggacaaaggccakgacgactttctggggaacgtggttctgaggctgcaggttctgacgctcacgggctgggcatccccgcctgtcaggacctgcgctgccgagaggaccagtggtaccccctggaaccccgcactgagacctacccagaccgaggccagtgccacctccagttccaactcatccataagcggagagccacttcggccagccgctcgcagccsagctacaccgtgcacctccacctcctgcagcagcttgtgtcccacgaggtcacccagcacgaggcgggaagcacctcctgggacgggtcgctgagtccccaggctgccaccgtcctctttctgcacgccacacagaaggacctatccgacttccaccagtccatggcgcagtggctggcctacagccgcctctaccagagcctggagttccccagcagctgcctcctgcaccccatcaccagcatcgagtaccagtggatccagggtcggctcaaggcagaacagcaggaggagctggccgcctcattcagctcctgctgacctacggcctctcctcatccggaggttccgctctgtcttccccctctctgtctcggactccccagcccggctgcagtctcttctcagggtcntggtacagatgtgcaagatgaaggcctttggagaactgtgccccaacaccgccccattgccccagctggtgactgaggccctgcagactggcaccactgaatggttccacctgaagcagcagcaccatcaacccatggtgcagggcatcccgraggcaggcaaggccttgctgggcctggtacaggatgtcattggcgacctgcaccagtgccagcgcacatgggacaagatcttccacaataccctcaagatccacctcttctccatggctttccgggagctgcagtggctggtggccaagcgggtgcaggaccacacgacggttgtgggtgatgtagtgtccccagagatgggcgagagtctgttccagctctacatcagcctcaaggagctctgccagctgcgcatgagctcctcagagagggatggagtcctggccctggataatttccaccgctggttccagccggccatcccctcctggctgcagaagacgtacaacgaggccctggcgcgggtgcagcgcgctgtgcagatggatgagctggtgcccctgggtgaactgaccaagcacagcacatcagcggtggatctatccacctgctttgcccagatcagccacactgcccggcagctggactggccagacccagaggaggccttcatgattaccgtcaagtttgtggaggacacctgtcgcctggccctggtgtactgcagccttataaagrmccgggcccgcgagctctcttcaggccagaaggaccaaggccaggcagccaacatgctgtgtgtggtggtgaatgacatggagcagctgcggctggtngatcggcaagttgcccgcccagctggcatgggaggccctggagcagcgggtaggggccgtgctggagcaggggcagctgcagaacacgctgcatgcccagctgcagagcgcgctggccgggctgggccatgagatccgcactggcgtccgcaccctggccgagcagttggaggtgggcatcgccaagcacatccagaaactggtgggcgtcagggagtctgtcctgcctgaggatgccattctgcccctgatgaagttcctggaggtggagctttgctacatgaacaccaacttggtgcaggagaacttcagcagcctcctgaccctgctctggacccacacactcacagtgctggtggaggcggccgc

SEQ ID NO: 99 - DNA, 1346 bp, Homo sapiens
  misc_feature (291)..(291): n equals a,t,g, or c
  misc_feature (421)..(421): n equals a,t,g, or c
  misc_feature (423)..(423): n equals a,t,g, or c
  misc_feature (425)..(425): n equals a,t,g, or c
ccacgcgtccgctagaatgggcacgagctctgccctcatcacagtccaaaagtgagcacctgcctggagctgcccagaaacagccttgtggggtggggttggtgtctgacctccctccccgggggccttcgcaggcttctctgctggtgcttctgtgcctgtaggtctggattcctccagggcctgatcctgggtgcagatgcagctggaagccctgaacctgctgcacacactagtctgggcacggagtctctgccgtgccggagctgtgcagacacaggagcggctgtnaggcagtgccagccctgagcaagtgccagctggtgagtgctgtgctctgcaggagtatgaggccgccgttggagcagctcaagagcgagcagatccgggcgcaggctgaggagaggaggaagaccctgancnangagacccggcagcaccaggccagggcccagtatcaagacaagctggcccggcagcgctacgaggaccaactgaagcagcagcaacttctcaatgaggagaatttacggaagcaggaggagtccgtgcagaagcaggaaaccatgcggcgagccaccgtggaaccggagatggagctgcggcacaagaattgagattgctgccgatggagaccgatgcccgggcgcgcgccaaggccgagcgggagaatgcagacatcatccgcgagcagatccgcctgaaggcgtccgagcaccgtcagaccgtcttggagtccatcaggacggctggcaccttgtttggggaaggattccgtgcctttgtgacagaccgggacaaagtgacagccacggtaaacatattcataaaacagggctggcaggtggctgagaggcagcatgtgggggcctcctggagccccaggtcctgtccctgccggctctgcacagccctgtagctctcccagcacagagcaaacccacgttgtacctgctgggctcggctgctcctccctccttgagctgggagaaaaaaatgcagttgccagcctgggccacacggtgagaccccatctctacgaagaataaaacattagctgggtgtgatggtggcgcctgtggtcctgctactcgagaggctgaggtaggaggatcacttaagcccaggaggtttgggctgcagtgagccaacattgcaccactgcactccattcttggcgagagaataagaccttgtctcaagaaaaaaatggccaggcggtagtggctcaggcctgtaatcccagcattttcggaggcggaggtgggcggatcacgaggtccggagatcgagatcatcctggtaagagtgaaaccctgtctctaccaaaaaaaaaaaaaaaaaaa

SEQ ID NO: 100 - DNA, 536 bp, Homo sapiens
gatttgaagagggcttgccttccaacctataggcactatatatgcttttggaaaaagtaattaggttaagatgcagttgttttgttttgctttgtttttcccttagctgggttggggtttctagcagcaatgatgtacaggtggatcttttttcacattaacactaccagctgctccatggctatagtgcttaggaatatctcagaatttcaacagatctatcagctgcaatatctaggagtcttgccaacacagagacacattcacatgctgaaaagagcatgagttgaaggcacagctggggacttttgatgcaggtccagaactggatggttgtgaagccattagagatatttaaattgtccagaatttcaggctctgctttaaaaactaggctacaaaccctcattcagaaagaggtcagtaatatgcctgtgagttagaaagatactggaaacatttcaatgccaaaagtaacatttttttccagaatgctatgactaaattttttaaaaaaaaaaaaaaagggcggccgc

SEQ ID NO: 101 - DNA, 1898 bp, Homo sapiens
  misc_feature (265)..(265): n equals a,t,g, or c
  misc_feature (1854)..(1854): n equals a,t,g, or c
  misc_feature (1859)..(1859): n equals a,t,g, or c
  misc_feature (1888)..(1888): n equals a,t,g, or c
  misc_feature (1897)..(1897): n equals a,t,g, or c
gggtggagagagttcggcgctcagagaggtaccagaccatgaagctcttcacccagatcttcggggtcggtgtgaagactgctgaccggtggtaccgggaaggactgcgaaccttagatgacctccgagagcagccccagaaactaacccaacagcagaaagcggggctccagcaccaccaggacctgagcaccccagtcctgcggtccgatgtagatgccctgcagcaggtggtggaggaagctgtggggcaggccctgctggngccaccgtcacgctgaccggcggcttccgcagggcctcatcctgtaccaccagcaccagcacagctrctgtragtcccctacccgcctggcccaacaragccacatggacgcttttragagaagtttctgcattttccgcctaccacaacctccaggggctgctgtggggggatccacgaggccctgcccatcctggaagccgtgagagtggacttggtagttgcacccgtcagccagttccctttcgccctgctcggttggactggctccaagcttttccagcgggagctgcgccgcttcagccggaaggagaagggcctgtggctgaacagccatgggctgtttgacccggagcagggaagcagcagtggcaagactcctaggtcacggaagtcctgcttctgttgcagaagacatttttccamgmggcttcagaggaagacatcttcagacacctgggccttgagtaccttcctccagagcagagaaacgcctgagcctgcctgtktcccccacttccactcaggaaattgggctgcccccaacctggccactgaatgtctccaggcagatatgctgccccctgacccccaccttcacccctccccgccaaggcctggctcttccggaggtcaattgtgcctgcaggatcagttgagcccctgctggtgtgctgcagggtgtgatgaggtgggagccctcagtgccagcctcatcactgtgtgaccctgggtctgctcttagcctccccatggctcacgttcctgccctggatgggatgtgagtggggcccacatcgtggagctgtggtggggcctgcagtcatgaatggcaagtggtccctgatgtgcagtgtctcattagttgcactgcagttaactgtggctcctgcagggcaccctgcccagaatgcccagaagagaaccatgcatacctgcactgcatttgagagccatgagctggaggctgtggttcgtgccagcaaggagcctactgtctggtgtgctgtaggcatctggagagggagagggcctgggtaggagctgggaggaagataattttcaactatggggcttcagtactgcagcgccccgagccaggctctgtgcttctgcctttaaggcctgttctcagcacaatgtctcaaaaataggtcatatcctgccactcccgtcgcagagccctttaatggttccaaaccctaagtccacacatagcccctggctctggcatctctccagccccactggccccgagctgcttgactcaccggcttcctatttgatgcacccaggcccccttgtggccaactccctccccttctcactgaggcagaagcactgaggtgggctggacatgggtgccctccacgtccctcatatccccaggcacactctggcctcaggttttgccctggccatgtcatctacctggagtgggccctccccttcttcaggccttgaatcaaaagccactttgttaggcgaggatttcccagaccactcatcacattaaaaaatattttgaaaacatgcagtaaaaaaaaaaaaaaaaaaaaagggcggccgctttaaaaggatccttcganggggncccaagcttacgccgggcattgccaacgncataacttnt

SEQ ID NO: 102 - DNA, 1982 bp, Homo sapiens
  misc_feature (35)..(35): n equals a,t,g, or c
cggacgcgtgggcgagcccgggcgccggcgggcgnccgtcgcgtctgacagaccactgcagaccacgggccgaggcccagcgcccgtccgcagcgcgsscggcatggcggcgacaaggagccccacgcgggcaagggagcgggagcggtctggcgctsccgccgcaggaagtgaccaagttcactcctggatgctagctacaagccaagccttagacactgtctggagaatggcaaaaggctttgtgatgttggcagtttcatttctggtggctgccatctgctacttccggaggctacatttatattcagggcacaagctgaaatggtggattggatatctgcagagaaaattcaaaaggaacctcagtgtggaggcagaggttgatttactcagttattgtgcaagagaatggaaaggagagacaccccgtaacaagctgatgaggaaggcttatgaggagctattttggcggcatcacattaaatgtgttcgacaagtaaggagagataactatgatgctctcagatcagtgttatttcagatattcagccagggcatctcttttccatcatggatgaaagaaaaggacattgttaagcttcctgaaaaactgctgttttcacaaggttgtaattggattcagcagtacagttttggtcctgagaagtatacaggctcgaatgtgtttggaaaactacggaaatatgtggaattattgaaaacacagtggactgaatttaatggcattagagattatcacaagagaggaagtatgtgcaacacccttttttcagatgccattctggaatataaactttatgaagctttaaagttcatcatgctgtatcaagtcactgaagtttatgaacaaatgaagactaaaaaggtcattcccagtctttttagactcctgttttccagggagacatcctctgatcctttgagcttcatgatgaatcacctgaattctgtaggcgacacatgtggactagagcagattgatatgtttatacttggatactcccttgaagtaaagataaaagtgttcagactgttcaagtttaactccagagactttgaagtctgctacccagaggagcctctcagggactggccggagatctccctgctgaccgagaacgaccgccactaccacattccagtcttttaagtccgctgggggccgaacagcagtgctcaccagtgacggtggtcacagttgcaataaagtctctctctgaaaccaaagctagcatttcagcatggaaggaattaggaccttttcttcaggattacaggtacactggatgcagccatgcatggatggtttttctttatttttcagtgatttcctctgaagcagctgcactgatacatttgggagttggtggcttgactttgtccataaggggcgtggccacttcacatgatggcgggcctttaagagcacaaagaagtttaatatggacaacaacaggaaaaagcaagaagaaaacaagtagggaaaaacagctaacctggagagaaagaatttctttaacctttatgttcttcattaaaaatcttatcttggactgatttgagggatttttagaaacatggccttattttatataagcattaccttcccaggaatctttgttgtatattaatttttgataaccatttgattaactttaaaattaagtatatgtgtgtatatatacatatgtatgtttatatacacacatgtatctgtatagttttatatatacatatatacacatagacatacagagaaccactactttgtaatagtgtacagtttgttttatatctctttactttttttgttactattttatctggccagcgtaatagttttatttagattttttaaaattctgtagattaaagcaaatgacagttattgaactatcacaaaactattaaactgtggtacatttaaaaaaaaaaaaaaaaaaaaaaaaaaactcgag

SEQ ID NO: 103 - DNA, 3034 bp, Homo sapiens
  misc_feature (5)..(5): n equals a,t,g, or c
aaggntaccgtccctcccctcccaagtgctgagccactgcgctcggccagcgtaaatttcttctaaagatacattttagctattaaaaaaatctattttagctatagctacagcttttagctatcagtagctatagataaaaataactatattctaatatggcttaaatggagatatgaccctctcattgatattttcctatgtgtaattatttttgaagcattgtgagttctgtgaaattttgctatttattgaactatgaaagcacttgattttcttaactcttgagtgccagaaatttgggaagaatattcctgaggattagacaaataatgataccttgtgtatatacatggtgttggaatgtctacatttcccttaagggcatcaattccataagttggtctacagataacttcacattagttgaccattgtttaacaatgctttaaagttacatttgcataagaatccaacttgatttttctaggaaaagttaaggaaaagaaccgaagaacctgatcgtgatgagcgtctaaaaaaggagaagcaagaaagagaagaaagagaaaaagaacgggagagagaaagggaagaaagagaaaggaaaagacgaagggaagaggaagaaagagaaaaagaaagggctcgtgacagagaaagaagaaagagaagtcgttcacgaagtagacactcaagccgaacatcagacagaagatgcagcaggtctcgggaccacaaaaggtcacgaagtagagaaagaaggcggagcagaagtagagatcgacgaagaagcagaagccatgatcgatcagaaagaaaacacagatctcgaagtcgggatcgaagaagatcaaaaagccgggatcgaaagtcatataagcacaggagcaaaagtcgggacagagaacaagatagaaaatccaaggagaaagaaaagaggggatctgatgataaaaaaagtagtgtgaagtccggtagtcgagaaaagcagagtgaagacacaaacactgaatcgaaggaaagtgrtactaagaatgaggtcaatgggaccagtgaagacattaaatctgaagtgcagctktaagtatgcacagatgaagatggaactaagccgagtaagaagacatacaaaagcctcttctgaaggaaaagacagtgtagtcctgcaaaacattttgaggtacattgttttgtctcagctattttgtagcagactcgtgcccccattagtgtgcctctttggaaattatcgcccacatttgtaatatagtcgccattgaaaagttaattatcctttttttagggattttgatgtcatttcttttttttttttaataaaaaggttgaactgtttttttttttctttttggtattaagtccatcttgtgttggtacattggcagagacatatgctttaaaaacttaaatatttcggaggcacatgttggactactttgttttaattaaactgctagtatttctttgtcaaggatgtttctagttttttgctttattgccttgcattctaatgcagtttgttctgtaactcgagagccagtagcattggattgatggaagtgtagggtttatgaattattgcagctgactaccatacctcacacagcgttggtgttgtgagcggcccatgaaaagccaaattaaaaatcaaggattcagtcaaactaagcaggtactcatgccaggtactcctttctctacccacatccatgtttgaatgctattgcctgtgatctttacgcttaactgttgtgtatcttttttgttctttacaagaagtgcagaggggttttttgtgtattgcgtgaaaacttataaaacaaatgttaacagaatggaattttttttcaactgtatgtagggctgcagtggtggccagaattagatatctttaaagaattttaaatacaataaacacttcatattattcgccttgttacactcaatgcaattctcaagtctataagaggtatgtgcttaatatttcctactgtgtaggagaatttgcagtcagccataggtatgtaggaatagtcactcactggctgatacatttaaagcagcagtgtgaatagcaaggacagacaccttcaatttgtgaaatcaaagaactgatgcactatatagaacgaatttgggtttttaaagaaatattaaaagttaggtactgtaagtgttcttaaaacctgtaaacttcattctgtgggctagtggtgtgggacaaaatattcctaatgaaaggaagtaccaattagttgatttgttggtggcattccccttttgggaaagcaatgtaaggttatgtctgtgtatgtcattcacacttaggcaagcatacacaggcacatggctttaagaaccacactgatgccttgataattaaaaagaatacaagcattccatgtacacatgttaattagcagttagtgactgggccaacactttctcataaaaattggccttttacatgttgtctaattatcatttttccccaaattttgcgttgtaggactactgttcgaagatttttggaagaatactgagaacggcataaagtgaagatcgacatttaaaaaatgaggtgaaagaaagctatagtggcatagaaaaagtataaagctcagttagtttttttattattattattattaaaagttaattcaggactgatgtgacctaccagatttcagaacatgtgttaatagtatatatgccactgaaaacttaggtcctgtatcatacttttttctttaagactttttaagaaatattacttaaacatgtggcttgctcagtgtttaattgcaagttttcaatcttggactttgaaaacaggattaaacgttagtattcgtgtgaatcagactaagtgggatttcatttttacaactctgctctacttagcctttggatttagaagtaaaaataaagtatctctgactttctgttaaaaaaaaaaaaaaaaaaaaaaaaaaaaaaaaaaaaaaaaaaaaaaaaaaaaaaaaaactcgag

SEQ ID NO: 104 - DNA, 2008 bp, Homo sapiens
gcccacgcgtccgcccacgcgtccgcccacgcgtccggcggccgtggagtttgtgacatacgaggtgacacccctcgagtcacttcccttcaactccagctggagcgcctgcttggctttgggttcgttctgcagccttcgccccgctcctagcctcagggccggactccagcgcagagcccagcccagcgcagctgccagcagccacccagccgcccagccgcccagccccgcacgaaacccggccagagcttcctagcagcccgagccatgaacaccgaaatgtatcagacccccatggaggtggcggtctaccagctgcacaatttctccatctccttcttctcttctctgcttggaggggatgtggtttccgttaagctggacaacagtgcctccggagccagcgtggtggccatagacaacaagatcgaacaggccatggatctggtgaagaatcatctgatgtatgctgtgagagaggaggtggagatcctgaaggagcagatccgagagctggtggagaagaactcccagctagagcgtgagaacaccctgttgaagaccctggcaagcccagagcagctggagaagttccagtcctgtctgagccctgaagagccagctcccgaatccccacaagtgcccgaggcccctggtggttctgcggtgtaagtggctctgtcctcagggtgggcagagccactaaacttgttttacctagttctttccagtttgtttttggctccccaagcatcatctcacgaggagaactttacacctagcacagctggtgccaagagatgtcctaaggacatggccacctgggtccactccagcgacagacccctgacaagagcaggtctctggaggctgagttgcatggggcctagtaacaccaagccagtgagcctctaatgctactgcgccctgggggctcccagggcctgggcaacttagctgcaactggcaaaggagaagggtagtttgaggtgtgacaccagtttgctccagaaagtttaaggggtctgtttctcatctccatggacatcttcaacagcttcacctgacaacgactgttcctatgaagaagccacttgtgttttaagcagaggcaacctctctcttctcctctgtttcgtgaaggcaggggacacagatgggagagattgagccaagtcagccttctgttggttaatatggtataatgcatggctttgtgcacagcccagtgtgggattacagctttgggatgaccgcttacaaagttctgtttggttagtattggcatagtttttctatatagccataaatgcgtatatatacccatagggctagatctgtatcttagtgtagcgatgtatacatatacacatccacctacatgttgaagggcctaaccagccttgggagtattgactggtcccttacctcttatggctaagtctttgactgtgttcatttaccaagttgacccagtttgtcttttaggttaagtaagactcgagagtaaaggcaaggaggggggccagcctctgaatgcggccacggatgccttgctgctgcaaccctttccccagctgtccactgaaacgtgaagtcctgttttgaatgccaaacccaccattcactggtgctgactacatagaatggggttgagagaagatcagtttgggcttcacagtgtcatttgaaaacgttttttgttttgttttgtaattattgtggaaaactttcaagtgaacagaaggatggtgtcctactgtggatgagggatgaacaaggggatggctttgatccaatggagcctgggaggtgtgcccagaaagcttgtctgtagcgggttttgtgagagtgaacactttccactttttgacaccttatcctgatgtatggttccaggatttggattttgattttccaaatgtagcttgaaatttcaataaactttgctctgtttttctaaaaataaaaaaaaaaaaaaaaaagttttgccctataggtcgac

SEQ ID NO: 105 - DNA, 5061 bp, Homo sapiens
  misc_feature (5057)..(5059): n equals a,t,g, or c
ggcacaagcagctcgccgcgcagcggctgtatttgcggcctgtgcgagtaggcgcttgggcactcagtctccctggcgagcgacgggcagaaatctcgaaccagtggagcgcactcgtaacctggatcccagaaggtcgcgaaggcagtaccgtttcctcagcggcggactgctgcagtaagaatgtcttttccacctcatttgaatcgccctcccatgggaatcccagcactcccaccagggatcccacccccgcagtttccaggatttcctccacctgtacctccagggaccccaatgattcctgtaccaatgagcattatggctcctgctccaactgtcttagtacccactgtgtctatggttggaaagcatttgggcgcaagaaaggatcatccaggcttaaaggctaaagaaaatgatgaaaattgtggtcctactaccactgtttttgttggcaacatttccgagaaagcttcagacatgcttataagacaactcttagctaaatgtggtttggttttgagctggaagagagtacaaggtgcttccggaaagcttcaagccttcggattctgtgagtacaaggagccagaatctaccctccgtgcactcagattattacatgacctgcaaattggagagaaaaagctactcgttaaagttgatgcaaagacaaaggcacagctggatgaatggaaagcaaagaagaaagcttctaatgggaatgcaaggccagaaactgtcactaatgacgatgaagaagccttggatgaagaaacaaagaggagagatcagatgattaaaggggctattgaagttttaattcgtgaatactccagtgagctaaatgccccctcacaggaatctgattctcaccccaggaagaagaagaaggaaaagaaggaggacattttccgcagatttccagtggccccactgatcccttatccactcatcactaaggaggatataaatgctatagaaatggaagaagacaaaagagacctgatatctcgagagatcagcaaattcagagacacacataagaaactggaagaagagaaaggcaaaaaggaaaaagaaagacaggaaattgagaaagaacggagagaaagagagagggagcgtgaaagggaacgagaaaggcgagaacgggaacgagaaagggaaagagaacgtgaacgagaaaaggagaaagaacgggagcgggaacgagaacgggatagggaccgtgaccggacaaaagagagagaccgagatcgggatcgagagagagatcgtgaccgggatagagaaaggagctcagatcgtaataaggatcgcagtcgatcaagagaaaaaagcagagatcgtgaaagggaacgagagcgggaaagagagagagagagagaacgagagcgagaacgagaacgggagcgagagagagagcgagagagggaacgggagcgagaaagagaaaaagacaaaaaacgggaccgagaagaagatgaagaagatgcatacgaacgaagaaaacttgaaagaaaactccgagagaaagaagctgcttatcaagagcgccttaagaattgggaaatcagagaacgaaagaaaacccgggaatatgagaaagaagctgaaagagaagaagaaagaagaagagaaatggccaaagaagctaaacgactaaaagaattcttagaagactatgatgatgatagagatgaccccaaatattacagaggaagtgctcttcagaaaaggttgcgtgatagagaaaaggaaatggaagcagatgaacgagataggaagagagagaaggaggagcttgaggaaatcaggcagcgccttctggcagaagggcatccagatccagatgcagagctccagaggatggaacaagaggctgagaggcgcaggcagccacaaataaagcaagagccagaatcagaagaggaggaagaagaaaagcaagaaaaagaagaaaaacgagaagaacccatggaagaggaagaggagccagagcaaaagccttgtctgaaacctactctgaggcccatcagctctgctccatctgtttcctctgccagtggcaatgcaacacctaacactcctggggatgagtctccctgtggtattattattcctcatgaaaactcaccagatcaacagcaacctgaggagcataggccaaaaataggactaagtcttaaactgggtgcttccaatagtcctggtcagcctaattctgtgaagagaaagaaactacctgtagatagtgtctttaacaaatttgaggatgaagacagtgatgacgtaccccgaaaaaggaaactggttcccttggattatggtgaagatgataaaaatgcaaccaaaggcactgtaaacactgaagaaaagcgtaaacacattaagagtctcattgagaaaatccctacagccaaacctgagctcttcgcttatcccctggattggtctattgtggattctatactgatggaacgtcgaattagaccatggattaataagaaaatcatagaatatataggtgaagaagaagctacattagttgattttgtttgttctaaggttatggctcatagttcaccccagagcattttagatgatgttgccatggtacttgatgaagaagcagaagtttttatagtcaaaatgtggagattattgatatatgaaacagaagccaagaaaattggtcttgtgaagtaaaactttttatatttagagttccatttcagatttcttctttgccacccttttaaggactttgaatttttctttgtctttgaagacattgtgagatctgtaattttttttttttgtagaaaatgtgaattttttggtcctctaatttgttgttgccctgtgtactcccttggttgtaaagtcatctgaatccttggttctctttatactcaccaggtacaaattactggtatgttttataagccgcagctactgtacacagcctatctgatataatcttgttctgctgatttgtttcttgtaaatattaaaacgactccccaattattttgcagaattgcacttaatattgaaatgtactgtataggaaccaacatgaacaattttaattgaaaacaccagtcataaactattaccacccccactctcttttgatcagaaatggcaagcccttgtgaaggcatggagtttaaaattggaatgcaaaaattagcagacaatccattcctactgtatttctgtatgaatgtgtttgtgaatgtatgtgtaaaagtctttcttttccctaatttgctttggtggggtccttaaaacatttcccaactaaagaatagaattgtaaaggaaaagtggtactgttccaacctgaaatgtctgttataattaggttattagtttcccagagcatggtgttctcgtgtcgtgagcaatgtggtttgctaactggatggggttttcttattaataagatggctgcttcagcttctcttttaaaggaatgtggatcatagtgatttttccttttaattttattgctcagaaatgaggcatatcctaaaaatcctggagagctgtatttaatgcatttttgcactaattggtccttagtttaattctattgtatctgtttatttaacaaaaaattcatcataccaaaaagtgtaagtgaaaaccccctttaaaacaaaacaaaaaaatgaaataaaattaggcaaattgacagacagtgagagttttacaaacatgataggtattctgctcggcaatttgtaagtttacatgttatttaaggataaaggtaaatcattcaaggcagttaccaaccactaactatttgttttcatttttgtcttgtagaaggtttatatcttgttttaccttggctcattagtgtttaaaaatgtactgatgatgtgcttagagaaattcctggggctttcttcgttgtagatcagaatttcaccagggagtaaaattacctgaaaacgtaagaagttttaaacagcttttcacacaaattagatgcaactgttcccatgtctgagtacttatttaaaagaaaggtaaagattggcctgttagaaaaagcataatgtgagctttggattactggattttttttttttttaaacacacctggagaggacatttgaaaacactgttcttaccctcgaaccctgatgtggttccattatgtaaatatttcaaatattaaaaatgtatatatttgatcctggggactcatattctttcagaatcatgtaaataaatggcatcatgttgtaattgtgtggtgcatactagaaaagttaaaaatatgggctgamctttttatggacttgatttttatgactattggtatctaaaggtcaaggaagccatttacattattttggatgaatctactatacatctatggaaatgtctcttttattttaaattctggtttctcaacggaaaatttcagaaaagatgccccttgccattttcgttaatttttcagtcttttcttagacacacccccagcctaagaccttgttcgaggagtttattgtgtctgtcttttcttaacatactgcactgttcttaagcatcatattgtgttgtttttatttagccactattaacatgaaggtttattcaggtagatttgatttcctttgcttcgtttcttctcctgctctgtcaactgtacttatcttaaagggccactctaaaaacaagggagatgtcgtaatctgaaacctttggggagatgtactctgtactgcataacatctccagtgaggtttgtgacaggacctcaactaaatatatgaatttgtgcaagttcatatattaaagtttctgcagcagagtgaaaattgttacagtaaatgtggtagaaactgttaatcgcttaatgccagtttaaatcatgttttgtaaccaagcttcagtaaaaggctttagattgtcagagttggttgatttttagaattgtatatataaagaattagacattaaacaggcatattctagtgtctgaaaatacacmtaagaaatttctawwaaaaaaaaaaaannnaa

SEQ ID NO: 106 - DNA, 2791 bp, Homo sapiens
gtcacctgacacctcaccggtccggaattcccgggtcgacccacgcgtccgcccacgcgtccgtaatccgtggttttctggagcatttcacagcctaggaacatacaaggggggcatctccctggaatgtaaattgactaagaggaattcaataatggtcaaatgaatgcagaattttagagtcttgcttagtattctcaccacatttcgtttartctactcatactctttttctcttactgctgacactagatggaaaaactcttaattaaaagtatttcacaaaatgtgctcgttttcagtcattccgtttccactccagcctgttgtgttgtttttttgaaataataatttaaagtaattttccttttgcaggatggcatagtcaatccaacaataagaaaagatttgaaaactggaccgaaattctactgctgtccaattgaaggctgccccagaggccctgagagaccgttttctcagttttctctcgtaaaacagcactttatgaaaatgcatgctgagaagaagcacaaatgtagtaagtgcagcaattcgtacggtacagaatgggacctgaaaagacatgcagaggactgtggcaagaccttccggtgcacatgcggctgtccctacgccagtagaacagcactgcagtctcacatctaccgaactgggcacgagatacctgcagaacacagggacccacctagtaagaaaaggaaaatggaaaactgtgcacaaaaccagaagttatccaacaagaccattgaatcattgaacaaccaaccaatccctagaccagacactcaagaactagaagcttcagaaataaagctagaaccatcttttgaagactcttgtggctctaacactgacaagcagactcttacaacaccaccgagatatcctcagaagttgcttttaccaaagcccaaagtggctttggttaaactacccgtgatgcagttttctgtcatgcctgtctttgtgcctacagccgactcctcagcccagcctgtggtgttaggtgttgatcagggctctgccacaggggctgtgcacttaatgcccttgtcagtaggaaccctgatcctcggcctagattcagaggcttgctctcttaaggagagcctacctcttttcaaaattgctaatcctattgctggtgagccaataagtactggtgttcaagtgaactttggtaaaagtccatctaatcctttacaagaactagggaacacgtgtcaaaagawtagcatttcttcaatcaacgtgcagacagatctgtcttatgcctcacaaaactttataccttctgcacagtgggccactgctgattcctctgtgtcgtcttgttctcaaactgatttgtcgtttgattctcaagtgtctcttcccattagtgttcacactcagacatttttgcccagctctaaggtaacttcatctatagctgctcagactgatgcatttatggacacctgtttccagtcaggtggggtctccagagaaactcaaaccagtgggatagaaagtccaacggatgaccatgtacagatggaccaagctggaatgtgcggagacatttttgagagtgttcattcatcatataatgttgctacaggtaacattataagcaacagtttagtagcagagacagtaactcatagtttgttacctcagaatgagcctaagactttaaatcaagatattgagaaatctgcaccaattataaatttcagtgcacagaatagtatgcttccttcacagaacatgacagataatcagacccaaaccatagatttattaagtgatttggaaaacatcttgtcaagtaatctgcctgcccagacattggatcatcgtagtcttttgtctgacacaaatcctggacctgacacccagctcccatctggcccagcccagaaccccggaatcgattttgatatcgaagagttcttttcggcctcaaatatccagactcaaactgaagagagtgaacttagcaccatgaccaccgagccagtcttggagtcactggacatagagactcaaacggacttcttactcgcagatacctctgctcagtcctatgggtgtaggggaaattctaacttcttaggccttgagatgtttgacacacagacacagacagacttaaactttttcttagacagtagccctcatctgcctctgggaagtattctgaaacactccagcttttccgtgagtactgattcatctgacacagagacccaaactgaaggagtctccactgctaaaaatatacctgctctagaaagcaaagttcagttgaacagtacagaaacacagaccatgagttctgggtttgaaaccctggggagcttgttcttcaccagcaacgaaactcagacagcaatggatgactttcttctggctgatctggcctggaacacgatggagtctcagttcagctctgtagaaacccagacttctgcggaaccacacacagtctccaacttctaaaactaacggtggagtccatgtgtgaaatggcatctaccatttcctctggattaaaactacggactggggacaacagtattaattcgattgaatgtggctgatgatgcagttgcttagcttctttgtgtttctttgccttttgtacttgtaaacagaaatttgcgtataaatgtgagtgtattataaagtttgagatgttgatctaaattgtttttgtgttgcctacatttgccttttcacagctagtcttttcatgttaaaaaaaaaaaaaaaaaaaaaa

SEQ ID NO: 107 - DNA, 1251 bp, Homo sapiens
ggcacgagagaagaagtactactccaaaaactttggtaaagtgcttattcttccctagcagtaggctgttgctgagttgtagactggtggttttatgaaaaaaaaacaggttggggaggtgtgaagatggaaatgagggctgtgttatgtatatctggtatctacttctgttccaggtgcttaattcaccctcatactgatgtttaaagttagaggattcttgtccatttgtcttgtcttctgttggcaggtcacatgcaggtaataggctatgggaaggggaagatgcctagattacttctaggctggtctccaagccccaagttcaagcctcctgagtagctgagactacaggcacacaccatcgttctcaacttttcttttttaacataggctagctagctcccaccttagccttctagaccctccattataattcttattcaattgccttggcctcccaaagtgctggaattacaggtgtgagccactgcacccagctattttttctatatttttatgtagttcattgagggtaataattttatcctacaacaaacatgtaagttattgaagaatattggagttttatgataatgctgtcataaatataaaaggtagggtaagagggatccaaatagagctcacttatattgtcactgataggcagtcacgctgtgctgatagaatgtggcctgacacttgatggagtgcagcatatgtatacttgggcaatttgagcagatatatacggtcccgagtttaaagaagagaacaaacaccagtgcacagctatagtattcctaatataggatgcattttaaagaatttcacattctacaaatggagagagatggcaggagaagccttattttaagtcctgcactaaggcaggttaacctcatgggtgtaattacctggacctttttgtaaggacaaaatatttaatcattaaaaggccctctgtagggtttgaaatatctatattttatatatgaatgcttcttttattaatatttatggtaagatattttatactgctgataaacggacattaatgatatatagcctattgtttgaaaaaagcattttggattatagcccaaaactggaaataaccaacagataaataaatggtggtatattcatacaataaaatactactcagataaaaaagatgaacttaatctcataaacattatgggcaacatagtgagaacccatctcttttaaaaaaaaaaaaaaaaaaaa

SEQ ID NO: 108 - DNA, 1284 bp, Homo sapiens
gagctggccctatctgtctccgtccttgctacacacagctactgggaggatcattccaaaacacaaatctgagagagtcttcccttgccctcaacataaagactagactccagccaggcctaggaagccctgctcaagccagagtccacctacctgggccctctctcctatttcccattctgctactctgcttaacacacatggaatttatgccaaactacttggtgctctcaaaacatgccatggtgtcttttgcctctgtgtcttcacatattgtgtgtctctgcctgaaatgcttttccccgccttgataacctggtgaacttccagtcattccttgctgatgcagacagatgggtgagtgactgtacaccttcctctcccttgctaccttccatcagagaggctgggaagcaaaccctctacttccccagcctcccttgcagtgaggggtgcccacatgagagacattgtctggcaccagcccttccccactgctttctgtcttgaacccagatgtgatgcctggtgcagctgcagccatctcatgaccatgtcacaacaaacaccacaccacccaagtgacaagatgaacagtgcctggatgcctgatgacatggttcagctgccaggccaaccccaagcagccaacctccggaattctcatgagataattaaacattgttaagactgaagacactgtgaatcaaattgcctgtcacttgcaactaaaagcactcctgattgacactgggcctcacctcaagcacccactactcactgaagtccttctggatccctgctcctagtacaccttgcacaagcccatctcagcacttgtcctgttcactatattagatttgctcattgtctccctcccccattatactgagaccttttagaggaaagagactgagtctttccactttaatctttagtacctagcccagcccctagcacacagcaagtctttagtaggtagatttgtagaatataggtctattttccagccttatattgtaattttatacttacagtatttttattacaagctgcctccattccttattttaaaaaggccaagagaaacctagatgtccatcaataatggactggataaagaaaatgtattatggccgggtacagtggttcacatctgtaatactagcactttaggaagctgaggcaggaggattgtttgagcgcaggagttcaagacaagcctgggcagcacagtgagaccctatctctaccaaaaaaaaaaaaaaaaaaaaaaaaaaaaaa

SEQ ID NO: 109 - DNA, 1968 bp, Homo sapiens
  misc_feature (19)..(19): n equals a,t,g, or c
  misc_feature (291)..(291): n equals a,t,g, or c
  misc_feature (303)..(303): n equals a,t,g, or c
  misc_feature (308)..(308): n equals a,t,g, or c
gccgtgtaaatgacgtttnaaggcgagtgcggaaagtggcctggggagcctcggggagcggacgccctccgccctggtgctgacctgcctccctgccccttstgcctcctgtmagcagaggcctcggctccgcaactgccactcctcctcggggtgttgcacaagtttcgaggtcaccggcgaccccccctagcagcgcgcctggctctggcccccgcgaaggaggacggagtttgtgtgttgcatactttctaaggcggcggctgcagcagcggctccatccagcccgtnagctcctcctgnaaggnatggctggctacctgagtgaatcggactttgtgatggtggaggagggttmagtacccgagacctgctgaaggaactcactctgggggcctcacaggccaccacggacgaggtagctgccttcttcgtggctgacctgggtgccatagtgaggaagcacttttgctttctgaagtgcctgccacgagtccggcccttttatgctgtcaagtgcaacagcagcccaggtgtgctgaaggttctggcccagctggggctgggctttagctgtgccaacaaggcagagatggagttggtccagcatattggaatccctgccagtaagatcatctgcgccaacccctgtaagcaaattgcacagatcaaatatgctgccaagcatgggatccagctgctgagctttgacaatgagatggagctggcaaaggtggtaaagagccaccccagtgccaagatggttctgtgcattgctaccgatgactcccactccctgagctgcctgagcctaaagtttggagtgtcactgaaatcctgcagacacctgcttgaaaatgcgaagaagcaccatgtggaggtggtgggtgtgagttttcacattggcagtggctgtcctgaccctcaggcctatgctcagtccatcgcagacgcccggctcgtgtttgaaatgggcaccgagctgggtcacaagatgcacgttctggaccttggtggtggcttccctggcacagaaggggccaaagtgagatttgaagagattgcttccgtgatcaactcagccttggacctgtacttcccagagggctgtggcgtggacatctttgctgagctggggcgctactacgtgacctcggccttcactgtggcagtcagcatcattgccaagaaggaggttctgctagaccagcctggcagggaggaggaaaatggttccacctccaagaccatcgtgtaccaccttgatgagggcgtgtatgggatcttcaactcagtcctgtttgacaacatctgccctacccccatcctgcagaagaaaccatycacggagcagcccctgtacagcagcagcctgtggggcccggcggttgatggctgtgattgcgtggctgagggcctgtggctgccgcaactacacgtaggggactggctggtctttgacaacatgggcgcctacactgtgggcatgggttcccccttttgggggacccaggcctgccacatcacctatgccatgtcccgggtggcctgggaagcgctgcgaaggcagctgatggctgcagaacaggaggatgacgtggagggtgtgtgcaagcctctgtcctgcggctgggagatcacagacaccctgtgcgtgggccctgtcttcaccccagcgagcatcatgtgagtgggcctcgttccccccggagaatcccagcggggcctcagagatgcatctgggagaggtggggaagatggcaggcaagggtacccttggccaggactctggtgcccaccctgccacccccgcgctccacctgcagtgtttctgccctgtaaataggaccagtcttacactcgctgtagttcaagtatgcaacataaatcctgttccttccaaaaaaaaaaaaaaaaaaaaaaaaaaaaaaaaaaaaaaaaaaaaaaaaaaaaaaaaaaaaactcgag

SEQ ID NO: 110 - DNA, 1980 bp, Homo sapiens
  misc_feature (35)..(35): n equals a,t,g, or c
cggacgcgtgggcgagcccgggcgccggcgggcgnccgtcgcgtctgacagaccactgcagaccacgggccgaggcccagcgcccgtccgcagcgcggcggcatggcggcgacaaggagccccacgcgggcaagggagcgggacggtctggcgctcccgccgcaggaagtgaccaagttcactcctggatgctagctacaagccaagccttagacactgtctggagaatggcaaaaggctttgtgatgttggcagtttcatttctggtggctgccatctgctacttccggaggctacatttatattcagggcacaagctgaaatggtggattggatatctgcagagaaaattcaaaaggaacctcagtgtggaggcagaggttgatttactcagttattgtgcaagagaatggaaaggagagacaccccgtaacaagctgatgaggaaggcttatgaggagctattttggcggcatcacattaaatgtgttcgacaagtaaggagagataactatgatgctctcagatcagtgttatttcagatattcagccagggcatctcttttccatcatggatgaaagaaaaggacattgttaagcttcctgaaaaactgctgttttcacaaggttgtaattggattcagcagtacagttttggtcctgagaagtatacaggctcgaatgtgtttggaaaactacggaaatatgtggaattattgaaaacacagtggactgaatttaatggcattagagattatcacaagagaggaagtatgtgcaacacccttttttcagatgccattctggaatataaactttatgaagctttaaagttcatcatgctgtatcaagtcactgaagtttatgaacaaatgaagactaaaaaggtcattcccagtctttttagactcctgttttccagggagacatcctctgatcctttgagcttcatgatgaatcacctgaattctgtaggcgacacatgtggactagagcagattgatatgtttatacttggatactcccttgaagtaaagataaaagtgttcagactgttcaagtttaactccagagactttgaagtctgctacccagaggagcctctcagggactggccggagatctccctgctgaccgagaacgaccgccactaccacattccagtcttttaagtccgctgggggccgaacagcagtgctcaccagtgacggtggtcacagttgcaataaagtctctctctgaaaccaaagctagcatttcagcatggaaggaattaggaccttttcttcaggattacaggtacactggatgcagccatgcatggatggtttttctttatttttcagtgatttcctctgaagcagctgcactgatacatttgggagttggtggcttgactttgtccataaggggcgtggccacttcacatgatggcgggcctttaagagcacaaagaagtttaatatggacaacaacaggaaaaagcaagaagaaaacaagtagggaaaaacagctaacctggagagaaagaatttctttaacctttatgttcttcattaaaaatcttatcttggactgatttgagggatttttagaaacatggccttattttatataagcattaccttcccaggaatctttgttgtatattaatttttgataaccatttgattaactttaaaattaagtatatgtgtgtatatatacatatgtatgtttatatacacacatgtatctgtatagttttatatatacatatatacacatagacatacagagaaccactactttgtaatagtgtacagtttgttttatatctctttactttttttgttactattttatctggccagcgtaatagttttatttagattttttaaaattctgtagattaaagcaaatgacagttattgaactatcacaaaactattaaactgtggtacatttaaaaaaaaaaaaaaaaaaaaaaaaaaactcgta

SEQ ID NO: 111 - DNA, 1663 bp, Homo sapiens
ggtattaagtccatcttgtgttggtacattggcagagacatatgctttaaaaacttaaatatttcggaggcacatgttggactactttgttttaattaaactgctagtatttctttgtcaaggatgtttctagttttttgctttattgccttgcattctaatgcagtttgttctgtaactcgagagccagtagcattggattgatggaagtgtagggtttatgaattattgcagctgactaccatacctcacacagcgttggtgttgtgagcggcccatgaaaagccaaattaaaaatcaaggattcagtcaaactaagcaggtactcatgccaggtactcctttctctacccacatccatgtttgaatgctattgcctgtgatctttacgcttaactgttgtgtatcttttttgttctttacaagaagtgcagaggggttttttgtgtattgcgtgaaaacttataaaacaaatgttaacagaatggaattttttttcaactgtatgtagggctgcagtggtggccagaattagatatctttaaagaattttaaatacaataaacacttcatattattcgccttgttacactcaatgcaattctcaagtctataagaggtatgtgcttaatatttcctactgtgtaggagaatttgcagtcagccataggtatgtaggaatagtcactcactggctgatacatttaaagcagcagtgtgaatagcaaggacagacaccttcaatttgtgaaatcaaagaactgatgcactatatagaacgaatttgggtttttaaagaaatattaaaagttaggtactgtaagtgttcttaaaacctgtaaacttcattctgtgggctagtggtgtgggacaaaatattcctaatgaaaggaagtaccaattagttgatttgttggtggcattccccttttgggaaagcaatgtaaggttatgtctgtgtatgtcattcacacttaggcaagcatacacaggcacatggctttaagaaccacactgatgccttgataattaaaaagaatacaagcattccatgtacacatgttaattagcagttagtgactgggccaacactttctcataaaaattggccttttacatgttgtctaattatcatttttccccaaattttgcgttgtaggactactgttcgaagatttttggaagaatactgagaacggcataaagtgaagatcgacatttaaaaaatgaggtgaaagaaagctatagtggcatagaaaaagtataaagctcagttagtttttttattattattattattaaaagttaattcaggactgatgtgacctaccagatttcagaacatgtgttaatagtatatatgccactgaaaacttaggtcctgtatcatacttttttctttaagactttttaagaaatattacttaaacatgtggcttgctcagtgtttaattgcaagttttcaatcttggactttgaaaacaggattaaacgttagtattcgtgtgaatcagactaagtgggatttcatttttacaactctgctctacttagcctttggatttagaagtaaaaataaagtatctctgactttctgttaaaaaaaaaaaaaaaaaaaaaaaaaaaaaaaaaaaaaaaaaaaaaaaaaaaaaaaaaactcgag

SEQ ID NO: 112 - DNA, 2008 bp, Homo sapiens; identical to SEQ ID NO: 104

SEQ ID NO: 113 - DNA, 1771 bp, Homo sapiens
  misc_feature (1672)..(1672): n equals a,t,g, or c
  misc_feature (1696)..(1696): n equals a,t,g, or c
  misc_feature (1706)..(1706): n equals a,t,g, or c
  misc_feature (1749)..(1749): n equals a,t,g, or c
gcctgcagtcgacactagtggatccaaagaattcggcctgtgcgagtaggcgcttgggcactcagtctccctggcgagcgacgggcagaaatctcgaaccagtggagcgcactcgtaacctggatcccagaaggtcgcgaaggcagtaccgtttcctcagcggcggactgctgcagtaagaatgtcttttccacctcatttgaatcgccctcccatgggaatcccagcactcccaccagggatcccacccccgcagtttccaggatttcctccacctgtacctccagggaccccaatgattcctgtaccaatgagcattatggctcctgctccaactgtcttagtacccactgtgtctatggttggaaagcatttgggcgcaagaaaggatcatccaggcttaaaggctaaagaaaatgatgaaaattgtggtcctactaccactgtttttgttggcaacatttccgagaaagcttcagacatgcttataagacaactcttagctaaatgtggtttggttttgagctggaagagagtacaaggtgcttccggaaagcttcaagccttcggattctgtgagtacaaggagccagaatctaccctccgtgcactcagattattacatgacctgcaaattggagagaaaaagctactcgttaaagttgatgcaaagacaaaggcacagctggatgaatggaaagcaaagaagaaagcttctaatgggaatgcaaggccagaaactgtcactaatgacgatgaagaagccttggatgaagaaacaaagaggagagatcagatgattaaaggggctattgaagttttaattcgtgaatactccagtgagctaaatgccccctcacaggaatctgattctcaccccaggaagaagaagaaggaaaagaaggaggacattttccgcagatttccagtggccccactgatcccttatccactcatcactaaggaggatataaatgctatagaaatggaagaagacaaaagagacctgatatctcgagagatcagcaaattcagagacacacataagaaactggaagaagagaaaggcaaaaaggaaaaagaaagacaggaaattgagaaagaacggagagaaagagagagggagcgtgaaagggaacgagaaaggcgagaacgggaacgagaaagggaaagagaacgtgaacgagaaaaggagaaagaacgggagcgggaacgagaacgggatagggaccgtgaccggacaaaagagagagaccgagatcgggatcgagagagagatcgtgaccgggatagagaaaggagctcagatcgtaataaggatcgcagtcgatcaagagaaaaaagcagagatcgtgaaagggaacgagagcgggaaagagagagagagagagaacgagagcgagaacgagaacgggagcgagagagagagcgagagagggaacgggagcgagaaaragaaaaagacaaaaaacgggaccgagaagaagatgaagaagatgcatacgaacgaagaaaacttgaaagaaaactccgagagaaagaagctgcttatcaagagcgccttaagaattgggaaatcagagaacgaaagaaaacccgggaatatgagaaagaagctraaararaaggaagaaagaaggaaggagaattggccaaaggaagcttaaacganttaaaaagatttttttaggaagantttttgttgnttgattaggaggttgaccccaattttttaccagagggaattgntttttcaggaaaagttttcctt

SEQ ID NO: 114 - DNA, 1534 bp, Homo sapiens
ggcacaagcagctcgccgcgcagcggctgtatttgcggcctgtgcgagtaggcgcttgggcactcagtctccctggcgagcgacgggcagaaatctcgaaccagtggagcgcactcgtaacctggatcccagaaggtcgcgaaggcagtaccgtttcctcagcggcggactgctgcagtaagaatgtcttttccacctcatttgaatcgccctcccatgggaatcccagcactcccaccagggatcccacccccgcagtttccaggatttcctccacctgtacctccagggaccccaatgattcctgtaccaatgagcattatggctcctgctccaactgtcttagtacccactgtgtctatggttggaaagcatttgggcgcaagaaaggatcatccaggcttaaaggctaaagaaaatgatgaaaattgtggtcctactaccactgtttttgttggcaacatttccgagaaagcttcagacatgcttataagacaactcttagctaaatgtggtttggttttgagctggaagagagtacaaggtgcttccggaaagcttcaagccttcggattctgtgagtacaaggagccagaatctaccctccgtgcactcagattattacatgacctgcaaattggagagaaaaagctactcgttaaagttgatgcaaagacaaaggcacagctggatgaatggaaagcaaagaagaaagcttctaatgggaatgcaaggccagaaactgtcactaatgacgatgaagaagccttggatgaagaaacaaagaggagagatcagatgattaaaggggctattgaagttttaattcgtgaatactccagtgagctaaatgccccctcacaggaatctgattctcaccccaggaagaagaagaaggaaaagaaggaggacattttccgcagatttccagtggccccactgatcccttatccactcatcactaaggaggatataaatgctatagaaatggaagaagacaaaagagacctgatatctcgagagatcagcaaattcagagacacacataagaaactggaagaagagaaaggcaaaaaggaaaaagaaagacaggaaattgagaaagaacggagagaaagagagagggagcgtgaaagggaacgagaaaggcgagaacgggaacgagaaagggaaagagaacgtgaacgagaaaaggagaaagaacgggagcgggaacgagaacgggatagggaccgtgaccggacaaaagagagagaccgagatcgggatcgagagagagatcgtgaccgggatagagaaaggagctcagatcgtaataaggatcgcagtcgatcaagagaaaaaagcagagatcgtgaaagggaacgagagcgggaaagagagagagagagagaacgagagcgagaacgagaacgggagcgagagagagagcgagagagggaacgggagcgagaaaaaaaaaaaaaaaaaaaagggcggccgctctagaggatccaagcttacgtacgcgtgcatgcgacgtcaaagtcttctg

SEQ ID NO: 115 - DNA, 2791 bp, Homo sapiens
gtcacctgacacctcaccggtccggaattcccgggtcgacccacgcgtccgcccacgcgtccgtaatccgtggttttctggagcatttcacagcctaggaacatacaaggggggcatctccctggaatgtaaattgactaagaggaattcaataatggtcaaatgaatgcagaattttagagtcttgcttagtattctcaccacatttcgtttartctactcatactctttttctcttactgctgacactagatggaaaaactcttaattaaaagtatttcacaaaatgtgctcgttttcagtcattccgtttccactccagcctgttgtgttgtttttttgaaataataatttaaagtaattttccttttgcaggatggcatagtcaatccaacaataagaaaagatttgaaaactggaccgaaattctactgctgtccaattgaaggctgccccagaggccctgagagaccgttttctcagttttctctcgtaaaacagcactttatgaaaatgcatgctgagaagaagcacaaatgtagtaagtgcagcaattcgtacggtacagaatgggacctgaaaagacatgcagaggactgtggcaagaccttccggtgcacatgcggctgtccctacgccagtagaacagcactgcagtctcacatctaccgaactgggcacgagatacctgcagaacacagggacccacctagtaagaaaaggaaaatggaaaactgtgcacaaaaccagaagttatccaacaagaccattgaatcattgaacaaccaaccaatccctagaccagacactcaagaactagaagcttcagaaataaagctagaaccatcttttgaagactcttgtggctctaacactgacaagcagactcttacaacaccaccgagatatcctcagaagttgcttttaccaaagcccaaagtggctttggttaaactacccgtgatgcagttttctgtcatgcctgtctttgtgcctacagccgactcctcagcccagcctgtggtgttaggtgttgatcagggctctgccacaggggctgtgcacttaatgcccttgtcagtaggaaccctgatcctcggcctagattcagaggcttgctctcttaaggagagcctacctcttttcaaaattgctaatcctattgctggtgagccaataagtactggtgttcaagtgaactttggtaaaagtccatctaatcctttacaagaactagggaacacgtgtcaaaagawtagcatttcttcaatcaacgtgcagacagatctgtcttatgcctcacaaaactttataccttctgcacagtgggccactgctgattcctctgtgtcgtcttgttctcaaactgatttgtcgtttgattctcaagtgtctcttcccattagtgttcacactcagacatttttgcccagctctaaggtaacttcatctatagctgctcagactgatgcatttatggacacctgtttccagtcaggtggggtctccagagaaactcaaaccagtgggatagaaagtccaacggatgaccatgtacagatggaccaagctggaatgtgcggagacatttttgagagtgttcattcatcatataatgttgctacaggtaacattataagcaacagtttagtagcagagacagtaactcatagtttgttacctcagaatgagcctaagactttaaatcaagatattgagaaatctgcaccaattataaatttcagtgcacagaatagtatgcttccttcacagaacatgacagataatcagacccaaaccatagatttattaagtgatttggaaaacatcttgtcaagtaatctgcctgcccagacattggatcatcgtagtcttttgtctgacacaaatcctggacctgacacccagctcccatctggcccagcccagaaccccggaatcgattttgatatcgaagagttcttttcggcctcaaatatccagactcaaactgaagagagtgaacttagcaccatgaccaccgagccagtcttggagtcactggacatagagactcaaacggacttcttactcgcagatacctctgctcagtcctatgggtgtaggggaaattctaacttcttaggccttgagatgtttgacacacagacacagacagacttaaactttttcttagacagtagccctcatctgcctctgggaagtattctgaaacactccagcttttccgtgagtactgattcatctgacacagagacccaaactgaaggagtctccactgctaaaaatatacctgctctagaaagcaaagttcagttgaacagtacagaaacacagaccatgagttctgggtttgaaaccctggggagcttgttcttcaccagcaacgaaactcagacagcaatggatgactttcttctggctgatctggcctggaacacgatggagtctcagttcagctctgtagaaacccagacttctgcggaaccacacacagtctccaacttctaaaactaacggtggagtccatgtgtgaaatggcatctaccatttcctctggattaaaactacggactggggacaacagtattaattcgattgaatgtggctgatgatgcagttgcttagcttctttgtgtttctttgccttttgtacttgtaaacagaaatttgcgtataaatgtgagtgtattataaagtttgagatgttgatctaaattgtttttgtgttgcctacatttgccttttcacagctagtcttttcawgttaaaaaaaaaaaaaaaaaaaaaa

SEQ ID NO: 116 - DNA, 669 bp, Homo sapiens
  misc_feature (23)..(23): n equals a,t,g, or c
  misc_feature (37)..(37): n equals a,t,g, or c
  misc_feature (75)..(75): n equals a,t,g, or c
  misc_feature (97)..(97): n equals a,t,g, or c
  misc_feature (108)..(108): n equals a,t,g, or c
  misc_feature (202)..(202): n equals a,t,g, or c
tgggaggttcttttataagcagngctcgtttagtganccgtcagatcgcctggagacgccatccacgctgttttnacctccatagaagccaccgggnccgatccagcntccggactctagcctaggccgcgggacggataacaatttcacacaggaaacagctatgaccactaggcttttgcaaaaagctatttaggtgacnctatagaaggtacgcctgcaggtaccggtccggaattcccgggtcgacccacgcgtccgccctggggagcttgttcttcaccagcaacgaaactcagacagcaatggatgactttcttctggctgatctggcctggaacacgatggagtctcagttcagctctgtagaaacccagacttctgcggaaccacacacagtctccaacttctaaaactaacggtggagtccatgtgtgaaatggcatctaccatttcctctggattaaaactacggactggggacaacagtattaattcgattgaatgtggctgatgatgcagttgcttagcttctttgtgtttctttgccttttgtacttgtaaacagaaatttgcgtataaatgtgagtgtattataaagtttgagatgttgatctaaaaaaaaaaaaaaaaaaaaaaaaaaaaaaaaaaaaaaaaaaaaaaaaaaaa

SEQ ID NO: 117 - DNA, 1252 bp, Homo sapiens
  misc_feature (243)..(243): n equals a,t,g, or c
gagaagaagtactactccaaaaactttggtaaagtgcttattcttccctagcagtaggctgttgctgagttgtagactggtggttttatgaaaaaaaaacaggttggggaggtgtgaagatggaaatgagggctgtgttatgtatatctggtatctacttctgttccaggtgcttaattcaccctcatactgatgtttaaagttagaggattcttgtccatttgtcttgtcttctgttggcanggtcacatgcaggtaataggctatgggaaggggaagatgcctagattacttctaggctggtctccaagccccaagttcaagcctcctgagtagctgagactacaggcacacaccatcgttctcaacttttcttttttaacataggctagctagctcccaccttagccttctagacccctccattataattcttattcaattgccttggcctcccaaagtgctggaattacaggtgtgagccactgcacccagctattttttctatatttttatgtagttcattgagggtaataattttatcctacaacaaacatgtaagttattgaagaatattggagttttatgataatgctgtcataaatataaaaggtagggtaagagggatccaaatagagctcacttatattgtcactgataggcagtcacgctgtgctgatagaatgtggcctgacacttgatggagtgcagcatatgtatacttgggcaatttgagcagatatatacggtcccgagtttaaagaagagaacaaacaccagtgcacagctatagtattcctaatataggatgcattttaaagaatttcacattctacaaatggagagagatggcaggagaagccttattttaagtcctgcactaaggcaggttaacctcatgggtgtaattacctggacctttttgtaaggacaaaatatttaatcattaaaaggccctctgtagggtttgaaatatctatattttatatatgaatgcttcttttattaatatttatggtaagatattttatactgctgataaacggacattaatgatatatagcctattgtttgaaaaaagcattttggattatagcccaaaactggaaataaccaacagataaataaatggtggtatattcatacaataaaatactactcagataaaaaagatgaacttaatctcataaacattatgggcaacatagtgagaacccatctcttttaaaaaaaaaaaaaaaaaaaactcgaa

SEQ ID NO: 118 - protein, 59 aa, Homo sapiens
LLGTWLCPQLPPGLGAHHAPSSFSSYLCPVSPSIRLSDGTLWERLWPWSGGREQGGRHK

SEQ ID NO: 119 - protein, 139 aa, Homo sapiens
MSCPAHASPPCSNTSGCLEFSFCGFALPIPSPVLHSSWQGGEGWGWFGWVRGFFLCVRCCYLTVLRPYWPFSSSSYLYGTSNKDTHFRPGKKKKKKKKKKKKKKKKKKKKKKKKKKKKKKKKKKKKKKKKKKKKKKKKK

SEQ ID NO: 120 - protein, 30 aa, Homo sapiens
MLMMGTLVLILLHDVIVTFTEFYNAQNLKW

SEQ ID NO: 121 - protein, 23 aa, Homo sapiens
CLQWFVPLVPQQIPELILMTIWK

SEQ ID NO: 122 - protein, 20 aa, Homo sapiens
FLLSFCAFPCVFMFWVSVLH

SEQ ID NO: 123 - protein, 21 aa, Homo sapiens
MIYLSIYLLVNILAVSNSWPS

SEQ ID NO: 124 - protein, 9 aa, Homo sapiens
MFMMSVYIL

SEQ ID NO: 125 - protein, 10 aa, Homo sapiens
MTRCLWRTLQ

SEQ ID NO: 126 - protein, 32 aa, Homo sapiens
MFCGACQIGWNLWGLLWEMPREHRFRRWEQLV

SEQ ID NO: 127 - protein, 23 aa, Homo sapiens
MSVLLLSSSCGAAFAVLCPPHCE

SEQ ID NO: 128 - protein, 56 aa, Homo sapiens
GWFHLFWQEWEQEPGQNKLLEALVLGTAAGRVGTRQNCLQDESQERTLSPVSGVWL

SEQ ID NO: 129 - protein, 3 aa, Homo sapiens
GYS

SEQ ID NO: 130 - protein, 19 aa, Homo sapiens
MYAFLQGFIFLLLFFFIAE

SEQ ID NO: 131 - protein, 2 aa, Homo sapiens
GA

SEQ ID NO: 132 - protein, 34 aa, Homo sapiens
MISMCQMLRTTVMTHLWIVTWIQRSWQESGDIRV

SEQ ID NO: 133 - protein, 28 aa, Homo sapiens
MARNVWFFIVSFCYKFLSYFRASSTLKV

SEQ ID NO: 134 - protein, 49 aa, Homo sapiens
MLAWQHFQIAFCLLGSWGFGGRGSISTLHEIAYFIMMELLFLLSCDFFF

SEQ ID NO: 135 - protein, 1 aa, Homo sapiens
I

SEQ ID NO: 136 - protein, 71 aa, Homo sapiens [sequence omitted]

SEQ ID NO: 137 - protein, 55 aa, Homo sapiens
MWALKSLFLLTPSPVIRFYFAALWIRAAGRLLGGGGSPTPPTSLAPGFSEAGGLC

SEQ ID NO: 138 - protein, 265 aa, Homo sapiens
MGGQVAGVYAAYYPSDVSSLCLVCPAGLQYSTDNQFVQRLKELQGSAAVEKIPLIPSTPEEMSEMLQLCSYVRFKVPQQILQGLVDVRIPHNNFYRKLFLEIVSEKSRYSLHQNMDKIKVPTQIIWGKQDAGAGCVWGRHVGQVNCQLPGGASGKLWALSSDGKTQEDSQAHNRLFSFCAQHRQQQEAGLRPRLQPAFCTQHLLPSPKSDAATTLRDPAPNAVGAPVTLRKPVPYPWYPRFPRALGTTRKPPRYFSQNRNSYGTK

SEQ ID NO: 139 - protein, 29 aa, Homo sapiens
MLCVLVLFILYLPGFSKSNQDVPWGDILC

SEQ ID NO: 140 - protein, 5 aa, Homo sapiens
WASLT

SEQ ID NO: 141 - protein, 11 aa, Homo sapiens
MKPSWQLPSCA

SEQ ID NO: 142 - protein, 120 aa, Homo sapiens
MMCVVLTTLPCLTFSIAVTEVQKSINGSADVLPDMLPDLPVSLVLLSLIMVDIIEKLRIYPLRGSQKSKCSFKCEYFLKFDIFFTFLPLCYLTTCLMIPFLRANITDRRLQMKISKHNYF

SEQ ID NO: 143 - protein, 7 aa, Homo sapiens
MQVFEFF

SEQ ID NO: 144 - protein, 60 aa, Homo sapiens
MRSVPAILQMLWILRRSTNWTLYLILHGCPAVVCAWPRQHAPWGMVRLWVPTAAPAALSP

SEQ ID NO: 145 - protein, 23 aa, Homo sapiens
MAFLPSPAWWISLLPSLLSIARS

SEQ ID NO: 146 - protein, 12 aa, Homo sapiens
MLLLSIVLLLIL

SEQ ID NO: 147 - protein, 60 aa, Homo sapiens
MGFHLLLGLVNLLGLVNCFLLGKPNYLSLIVSIVAPLTFLFSFISNIKKKKKKGGRSRGS

SEQ ID NO: 148 - protein, 62 aa, Homo sapiens
EAFCFLRSYFCYSCNAPPYMPHLCESTGIRFGHHTCLKLGSVCSVFCVEWRKKRLPCCLPCS

SEQ ID NO: 149 - protein, 11 aa, Homo sapiens
MRWNLLLVKLL

SEQ ID NO: 150 - protein, 235 aa, Homo sapiens
  SITE (204): Xaa equals any of the naturally occurring L-amino acids
MGLPGLFCLAVLAASSFSKAREEEITPVVSIAYKVLEVFPKGRWVLITCCAPQPPPPITYSLCGTKNIKVAKKVVKTHEPASFNLNVTLKSSPDLLTYFCRASSTSGAHVDSARLQMHWELWSRQRGRPQGGDDLPGVLGQPTYHQQPDREGWAGPPAAETMPQAACQLLLPAEPDIGLVLVPGCKQRQCPAQRPHSGAPRRVXQGTHHRAGWQPCLHCGHHLQDAGLDPRGPRW

SEQ ID NO: 151 - protein, 11 aa, Homo sapiens
MHFHADYMHGC

SEQ ID NO: 152 - protein, 29 aa, Homo sapiens
MRQQQTHLAAGVLFCCRLTFSSSVSGKSG

SEQ ID NO: 153 - protein, 51 aa, Homo sapiens
LEAPSMKTDTRTIFVAIFSCISILLLFLSVFIIYRCSQHGELRERKGREGE

SEQ ID NO: 154 - protein, 2 aa, Homo sapiens
DI

SEQ ID NO: 155 - protein, 27 aa, Homo sapiens
MNVIIVLVHALCPWCRGCPHWGPLVPP

SEQ ID NO: 156 - protein, 82 aa, Homo sapiens [sequence omitted]

SEQ ID NO: 157 - protein, 14 aa, Homo sapiens
MAHWHVFYVFSCHS

SEQ ID NO: 158 - protein, 19 aa, Homo sapiens
MLPPLLEWAVFVPLSQLLL

SEQ ID NO: 159 - protein, 48 aa, Homo sapiens
INSWKRPVNASCFCICVLRWALWFLCTQSTFLVITIVIFIVMTAPELW

SEQ ID NO: 160 - protein, 26 aa, Homo sapiens
GQLRWSSLVSQFACLFILFSAKCIPF

SEQ ID NO: 161 - protein, 1 aa, Homo sapiens
F

SEQ ID NO: 162 - protein, 24 aa, Homo sapiens
MSIWLMHFCLLVLGKRMSILDVKL

SEQ ID NO: 163 - protein, 36 aa, Homo sapiens
MFCHCIVCLLLVLWSSLPFFIPSFLLLKVILSCGMI

SEQ ID NO: 164 - protein, 43 aa, Homo sapiens
  SITE (28): Xaa equals any of the naturally occurring L-amino acids
  SITE (33): Xaa equals any of the naturally occurring L-amino acids
DQFSTAVRHRVPAGHWQVAGSTPTPCPXNPDLXPGKEREGPVS

SEQ ID NO: 165 - protein, 281 aa, Homo sapiens
MAEALLLRATFYLLIGNANAAKPDLDKVISLKEANVKLRANALIKRGSMYMQQQQPLLSTQDFNMAADIDPQNADVYHHRGQLKILLDQVEEAVADFDECIRLRPESALAQAQKCFALYRQAYTGNNSSQIQAAMKGFEEVIKKFPRCAEGYALYAQALTDQQQFGKADEMYDKCIDLEPDNATTYVHKGLLQLQWKQDLDRGLELISKAIEIDNKCDFAYETMGTIEVQRGNMEKAIDMFNKAINLAKSEMEMAHLYSLCDAAHAQTEVAKKYGLKPPTL

SEQ ID NO: 166 - protein, 73 aa, Homo sapiens [sequence omitted]

SEQ ID NO: 167 - protein, 42 aa, Homo sapiens
MSKFVSLPVFLACISPWFNSYQIFGRGGTEVSSHSRALGCPY

SEQ ID NO: 168 - protein, 48 aa, Homo sapiens
MCPPHLMLICLMVMPRVQDLVTCAVVNTQRLGRSVSLVLPSFKVHGKI

SEQ ID NO: 169 - protein, 31 aa, Homo sapiens
MYNLSSLFMISFLVCHVTPSQTLKGPPLSWS

SEQ ID NO: 170 - protein, 65 aa, Homo sapiens
GSFPSPKHRQRGGEQFLVLFLFLKWCLYLQPPGGLPWPHFSAPPRHRHPSTLLHVTRKMPFAECT

SEQ ID NO: 171 - protein, 38 aa, Homo sapiens
MFLCCQIGPLGPFRFCFLGAGFLPWTPSLGTVDIKCLA

SEQ ID NO: 172 - protein, 34 aa, Homo sapiens
MFYWGGLSFYFLLSSGVGFYCFLFGFGMEIWIAA

SEQ ID NO: 173 - protein, 32 aa, Homo sapiens
MLIITPKLKKVGSQPQMEDWAPLLPSSASLLP

SEQ ID NO: 174 - protein, 44 aa, Homo sapiens
PARLLPPGPAVALLLLRGSCSLCCCHQPHKASCKAMPSAGSNVP

SEQ ID NO: 175 - protein, 8 aa, Homo sapiens
HRAVILAL

SEQ ID NO: 176 - protein, 45 aa, Homo sapiens
MAAAKALISLWLVSACGQWETSFPIYGGDMECQAVVFWWLEEERK

SEQ ID NO: 177 - protein, 34 aa, Homo sapiens
MQCPYLLGAQLLVSSICPVVPALPRPVNKCLVPD

SEQ ID NO: 178 - protein, 39 aa, Homo sapiens
MSEAGWWAWLFVILHPFGMPDTFHNNFKKDKTTAEKCIE

SEQ ID NO: 179 - protein, 10 aa, Homo sapiens
MGVGLLNRII

SEQ ID NO: 180 - protein, 39 aa, Homo sapiens
LFWSVSETGIAFGVSRVLGMLEGHLQEAWGRREISCDAL

SEQ ID NO: 181 - protein, 88 aa, Homo sapiens
SLKIFSVSGVLQGWPLAPEPLPQCSHQPPPHPSVCRASSTGPHAAFFTHSALGRFVIWLSLHWAEVCVHRVGVPSSPFHSEGHTQRCQ

SEQ ID NO: 182 - protein, 72 aa, Homo sapiens
METPQLQVQGQLLHLLLCLYHHKVVQQKLLLLILLKLLKVTTLYPMEQILGSFHQLERSFIGIILSHRLLRP

SEQ ID NO: 183 - protein, 20 aa, Homo sapiens
MSGVKLQLFGTRLSLPLSSY

SEQ ID NO: 184 - protein, 30 aa, Homo sapiens
MNSYMCACVFSSEIHLGGGFFCFFNSVPDL

SEQ ID NO: 185 - protein, 36 aa, Homo sapiens
MALTLPSQWVFLVFILDDLYAHLSLSRNFCWKHLLF

SEQ ID NO: 186 - protein, 26 aa, Homo sapiens
IFLHLLSCSLLFAWTNGEKSAQNEIM

SEQ ID NO: 187 - protein, 57 aa, Homo sapiens
WVDWQRKWTTKFFMLRSFLLETSQIFRFLWIMKQKSTEDLLLLNLSWQRMLQQLSTT

SEQ ID NO: 188 - protein, 27 aa, Homo sapiens
PAPHLPRLTLPCQVVWGPRCWGGESGS

SEQ ID NO: 189 - protein, 66 aa, Homo sapiens
DLLLLFCGDVPCSLYVSSHVCLCTHIASCAVFVSLPLMPASGMMERLWSRLRIMTAYKTDSTLTGK

SEQ ID NO: 190 - protein, 28 aa, Homo sapiens
MVKTVFAHCFLLFHLVTNDQDDLIFFPS

SEQ ID NO: 191 - protein, 59 aa, Homo sapiens
MLSQTNGSHVASTLLSFAVAWLGILGSSPSPTLSAPSQFLPGPHTLLQLPTLLQSHCRP

SEQ ID NO: 192 - protein, 4 aa, Homo sapiens
FVCI

SEQ ID NO: 193 - protein, 323 aa, Homo sapiens
  SITE (217): Xaa equals any of the naturally occurring L-amino acids
  SITE (226): Xaa equals any of the naturally occurring L-amino acids
  SITE (229): Xaa equals any of the naturally occurring L-amino acids
MELSKAFSGQRTLLSAILSMLSLSFSTTSLLSNYWFVGTQKVPKPLCEKGLAAKCFDMPVSLDGDTNTSTQEVVQYNWETGDDRFSFRSFRSGMWLSCEETVEEPGERCRSFIELTPPAKRENPMVIPGNADHLHRTSIHQLPPATNRLATHWEPCLWAQTERLCCCFLCPVRSPGDVAHMMYSQVFQATVNLGPEDWRPHVWNYGWAFYMACSPSXAAWRRLSPXSTXTPGWCWSSSASIVKSFKENPNCLPHHHQCFPRRLSSAAPTVGPLTSYHQYHNQPIHSVSEGVDFYSELRNKGFQRGASQELKEAVRSSVEEEQC

SEQ ID NO: 194 - protein, 34 aa, Homo sapiens
MAAMRHLLRLFSGCGDLGFLTLYIFFLYSKQNNF

SEQ ID NO: 195 - protein, 12 aa, Homo sapiens
MTSVQQFCIYSE

SEQ ID NO: 196 - protein, 16 aa, Homo sapiens
MRGKHVCLLLLLLGRF

SEQ ID NO: 197 - protein, 69 aa, Homo sapiens
MSHFRPARCLPGPCQTLLTFPLLVCAGLRRPPRPHSTQPGSSCSPRHPSFPSLSWVMLLPPCVTFEAVK

SEQ ID NO: 198 - protein, 21 aa, Homo sapiens
MWLSAFFLARLADSVLEESII

SEQ ID NO: 199 - protein, 14 aa, Homo sapiens
MSTFLWDIQTTYCF

SEQ ID NO: 200 - protein, 33 aa, Homo sapiens
LPRLQSALLLLPLPPTLQGHVRAPIYPPPACRS

SEQ ID NO: 201 - protein, 234 aa, Homo sapiens
KLLYTTLRHPKCFLQRLSLENCHLTEANCKDLAAVLVVSRELTHLCLAKNPIGNTGVKFLCEGLRYPECKLQTLVLWNCDITSDGCCDLTKLLQEKSSLLCLDLGLNHIGVKGMKFLCEALRKPLCNLRCLWLWGCSIPPFSCEDLCSALSCNQSLVTLDLGQNPLGSSGVKMLFETLTCSSGTLRTLRLKIDDFNDELNKLLEEIEEKNPQLIIDTEKHHPWEERPSSHDFMI

SEQ ID NO: 202 - protein, 8 aa, Homo sapiens
SLFWGCPW

SEQ ID NO: 203 - protein, 31 aa, Homo sapiens
MPLVPLLLSCPPTWLARFGVSLPCSGIPVLA

SEQ ID NO: 204 - protein, 5 aa, Homo sapiens
MPCLF

SEQ ID NO: 205 - protein, 51 aa, Homo sapiens
  SITE (43): Xaa equals any of the naturally occurring L-amino acids
MRAFIWTCGTWTLWSLSDRSLGSSRICMGFAGSLKRPGRTKAXTTFWGTWF

SEQ ID NO: 206 - protein, 66 aa, Homo sapiens
  SITE (31): Xaa equals any of the naturally occurring L-amino acids
MQLEALNLLHTLVWARSLCRAGAVQTQERLXGSASPEQVPAGECCALQEYEAAVGAAQERADPGAG

SEQ ID NO: 207 - protein, 39 aa, Homo sapiens
MLLEKVIRLRCSCFVLLCFSLSWVGVSSSNDVQVDLFSH

SEQ ID NO: 208 - protein, 71 aa, Homo sapiens [sequence omitted]

SEQ ID NO: 209 - protein, 327 aa, Homo sapiens
MLATSQALDTVWRMAKGFVMLAVSFLVAAICYFRRLHLYSGHKLKWWIGYLQRKFKRNLSVEAEVDLLSYCAREWKGETPRNKLMRKAYEELFWRHHIKCVRQVRRDNYDALRSVLFQIFSQGISFPSWMKEKDIVKLPEKLLFSQGCNWIQQYSFGPEKYTGSNVFGKLRKYVELLKTQWTEFNGIRDYHKRGSMCNTLFSDAILEYKLYEALKFIMLYQVTEVYEQMKTKKVIPSLFRLLFSRETSSDPLSFMMNHLNSVGDTCGLEQIDMFILGYSLEVKIKVFRLFKFNSRDFEVCYPEEPLRDWPEISLLTENDRHYHIPVF

SEQ ID NO: 210 - protein, 7 aa, Homo sapiens
MFECYCL

SEQ ID NO: 211 - protein, 130 aa, Homo sapiens
MYQTPMEVAVYQLHNFSISFFSSLLGGDVVSVKLDNSASGASVVAIDNKIEQAMDLVKNHLMYAVREEVEILKEQIRELVEKNSQLERENTLLKTLASPEQLEKFQSCLSPEEPAPESPQVPEAPGGSAV

SEQ ID NO: 212 - protein, 9 aa, Homo sapiens
ALWLLLQLS

SEQ ID NO: 213 - protein, 19 aa, Homo sapiens
MWLMMQLLSFFVFLCLLYL

SEQ ID NO: 214 - protein, 21 aa, Homo sapiens
MFKVRGFLSICLVFCWQVTCR

SEQ ID NO: 215 - protein, 17 aa, Homo sapiens
MPWCLLPLCLHILCVSA

SEQ ID NO: 216 - protein, 38 aa, Homo sapiens
MLSPSQTPGSCLKWAPSWVTRCTFWTLVVASLAQKGPK

SEQ ID NO: 217 - protein, 327 aa, Homo sapiens; identical to SEQ ID NO: 209

SEQ ID NO: 218 - protein, 7 aa, Homo sapiens
MFECYCL

SEQ ID NO: 219 - protein, 130 aa, Homo sapiens; identical to SEQ ID NO: 211

SEQ ID NO: 220 - protein, 9 aa, Homo sapiens
ALWLLLQLS

SEQ ID NO: 221 - protein, 9 aa, Homo sapiens
ALWLLLQLS

SEQ ID NO: 222 - protein, 19 aa, Homo sapiens
MWLMMQLLSFFVFLCLLYL

SEQ ID NO: 223 - protein, 19 aa, Homo sapiens
MWLMMQLLSFFVFLCLLYL

SEQ ID NO: 224 - protein, 47 aa, Homo sapiens
  SITE (17): Xaa equals any of the naturally occurring L-amino acids
MFKVRGFLSICLVFCWXGHMQVIGYGKGKMPRLLLGWSPSPKFKPPE

SEQ ID NO: 225 - DNA, 3350 bp, Homo sapiens
tattaatatgacatttgtcattgtcactgatttttttaaaaaagcaatgcacatgttggttgtggctgttttccgcatgctatcttcatatctaaatgcttcattaattatccgagcctccggagaattaactctattacgtttgtatagtaagtttgtaaactgcttggcaaactgattaagaaataatttgcaataccgtgctactaaagtggcaggtttctggtagaaattgtgcgagtccaatttggagttttaagttccttgattgatgaaactaaaaaggcaattttggaaaaagagagggggaaaagtagatcacttatcttagcaaacggttgaaaatatgtctgtcctctgtggccccaaatccagtgaaagaaattctcccagtaaaagttgcttcctaactctgtttttctcagaatacctcttacctttctcaaagaaagcttcaaccaccatcatcagaaagaaggtggcctaaaaactgacacatggccagtgcccggaggggtctggaggcataagtctagatgcccagagagcatccaggcactgaactgctcagagcttgagatgaaatgacatacaagcttcagggtaaaactgtctactagcaagattacctccctcaattctaccattgcagatttcttctgaccccaaatgcaaccttacagagaatgctgaatgaggaaggccaattccttacaatgatggcagaacccccaagcgaatgccctattgaggagaaggacatcactgtatttggaattctgcctgctagtgatagctcacacatcacatcccagaatcccactcccaatgcattatttcctgaggcaagaacttaaggtcctcacctaattcctccatcacaaccattaactcttattggacaagctcctcctgtgagtagggcctgtactcacttcctcttagatcataattccatcttcaagagactgatttccagaatagtaatctttttccagcgttctctcttctccaatgccctggttgttatttttcccacctctcctaatattgatcttcttgtcttttggttagaactgcaacttcggagttgagttcatttcctattgctgctcaattcagtagcaacatagctggcttgttcccagacccaggaagtataagtcattgacagtttcctgagtggctctgccaatccataccacccttggtactgtgaaaaggcttcttggcagccaggtggcattgaggatggtattcagggcgctttccttctgtcatatagttgtgggatctctaccaagtgtgaaggtgaatgaggtaagggagatcagaaccatgcttcctggtttttcatacatccaaggaagaagtcctggtgtgggttgtttgacaccttctttccactttcaccttttattttttattccttcctttctacccccaaccagtcgagcaaatgagcaattttgtgtttctaatacaggatctggaagtagtgctttctaatcctcatttcctgtaggatgttcctgcactataacaagattatgttttcttccttctgcagcagctttctgcttcttgggtactactagctattgttcaattcaggtgaggcctgtgatgacatatatgtagcatgtgctctgcgctccctgcaagctgagcagatacaaccaatgcatcactgtatactcttgctgagaatgtggatgcagcctcacagatctttgcaacactccaaccagccaggaccagttgatcagaactgatcttattggtctgataaccaatcttatttgtgaactgattcatatctgtctttccactcttggttctcttgccgtagaacaaaaacagtttaggaagcataattacgaacatttaggaaccaatatgtataagtaattcggagactccaattcacctgcccctcccccatcccaggttgtggaggctcgaggaagctgacttcttaggctaaaggacaaaaaaatctctttacctccttggccattttcatgttctctgccaattactataggcagtcttcattttgcagaggtgaggtaagacttcatcttattcttcatgtaatcccaccttctaacaaaaaataaataaatatttaaattccaaggagaagtgttctttgtgtatttctagcagaaaacagatgcttaagcctaagaaggaagatccgtccatgacaaaggaaagtggaaaactgaaccagttatctgaatacttcatgccaggacagttgctattagcaactgttttgcaccttcagggctttaaaatgggctctgcagacagcatttgcatatgcaagactcagtagccaagcctccactgccaattgttgaaggcagtttcagatcgccaccttttgaggtacatttctttaagcacaagagaagtagaaatggcctttgccttgtctccagtggtttgtccctctggtgcctcagcagataccagagcttattcttatgaccatttggaagtagtcctcaaagtaaagatcaagaaaaaattggattctttttccattttctcataatagtagcctagtcaacacaagactcccataaaatatgactcactattgggagccatactattttataagcttacttcctgctgacaaaactagctttcctcaaggaaatataaaggaggggaaagtcacatagtgttaggaaaacattcctgtgttttgaatacgatgaatccataggatagagaaaaatctgcttgttctattctgagagttctctgagatatcccttcactctgcttggcatttggccattgatattcaacaggtcactgaccaagcttttctaaatttttcagagagagttacttaccagtaaggtctgttcttaaacctacctagttgattttcatatctttccataaagtgtcatgattctgtcatagaccctgacttaacattgtaaggactatgagtcctccattttttaattaatttttttttagcaaattaggacttcggcaggttttcctctcctaaactcattctttcctccacaggattgctttgtccatctcctgctttcatttcaagtgcataaacaaaacctcaaagggcctgggaaggtgaggcaggccagagtctgtgttctgtgttgagtgtcaagctatttgttaagaaggtctgcaacaggcctttggtgtgggctctgccagagactgttctgaacactttgcttgagatccgtgccctgtaaaatggatatgatgttttactgatgtctgtaatacatttgtaaacttccaataaaatttgaataaaagaaatgttgccattcttctca

SEQ ID NO: 226 - DNA, 3349 bp, Homo sapiens
tattaatatgacatttgtcattgtcactgatttttttaaaaaagcaatgcacatgttggttgtggctgttttccgcatgctatcttcatatctaaatgcttcattaattatccgagcctccggagaattaactctattacgtttgtatagtaagtttgtaaactgcttggcaaactgattaagaaataatttgcaataccgtgctactaaagtggcaggtttctggtagaaattgtgcgagtccaatttggagttttaagttccttgattgatgaaactaaaaaggcaattttggaaaaagagagggggaaaagtagatcacttatcttagcaaacggttgaaaatatgtctgtcctctgtggccccaaatccagtgaaagaaattctcccagtaaaagttgcttcctaactctgtttttctcagaatacctcttacctttctcaaagaaagcttcaaccaccatcatcagaaagaaggtggcctaaaaactgacacatggccagtgcccggaggggtctggaggcataagtctagatgcccagagagcatccaggcactgaactgctcagagcttgagatgaaatgacatacaagcttcagggtaaaactgtctactagcaagattacctccctcaattctaccattgcagatttcttctgaccccaaatgcaaccttacagagaatgctgaatgaggaaggccaattccttacaatgatggcagaacccccaagcgaatgccctattgaggagaaggacatcactgtatttggaattctgcctgctagtgatagctcacacatcacatcccagaatcccactcccaatgcattatttcctgaggcaagaacttaaggtcctcacctaattcctccatcacaaccattaactcttattggacaagctcctcctgtgagtggggcctgtactcacttcctcttagatcataattccatcttcaagagactgatttccagaatagtaatctttttccagcgttctctcttctccaatgccctggttgttatttttcccacctctcctaatattgatcttcttgtcttttggttagaactgcaacttcggagttgagttcatttcctattgctgctcaattcagtagcaacatagctggcttgttcccagacccaggaagtataagtcattgacagtttcctgagtggctctgccaatccataccacccttggtactgtgaaaaggcttcttggcagccaggtggcattgaggatggtattcagggcgctttccttctgtcatatagttgtgggatctctaccaagtgtgaaggtgaatgaggtaagggagatcagaaccatgcttcctggtttttcatacatccaaggaagaagtcctggtgtgggttgtttgacaccttctttccactttcaccttttattttttattccttcctttctacccccaaccagtcgagcaaatgagcaattttgtgtttctaatacaggatctggaagtagtgctttctaatcctcatttcctgtaggatgttcctgcactataacaagattatgttttcttccttctgcagcagctttctgcttcttgggtactactagctattgttcaattcaggtgaggcctgtgatgacatatatgtggcatgtgctctgcgctccctgcaagctgagcagatacaaccaatgcatcactgtatactcttgctgagaatgtggatgcagcctcacagatctttgcaacactccaaccagccaggaccagttgatcagaactgatcttattggtctgataaccaatcttatttgtgaactgattcatatctgtctttccactcttggttctcttgccgtagaacaaaaacagtttaggaagcataattacgaacatttaggaaccaatatgtataagtaattcggagactccaattcacctgcccctcccccatcccaggttgtggaggctcgaggaagctgacttcttaggctaaaggacaaaaaaatatctttacctccttggccattttcatgttctctgccaattactataggcagtcttcattttgcagaggtgaggtaagacttcatcttattcttcatgtaatcccaccttctaacaaaaaataaataaatatttaaattccaaggagaagtgttctttgtgtatttctagcagaaaacagatgcttaagcctaagaaggaagatccgtccatgacaaaggaaagtggaaaactgaaccagttatctgaatacttcatgccaggacagttgctattagcaactgttttgcaccttcagggctttaaaatgggctctgcagacagcattagcatatgcaagactcagtagccaagcctccactgccaattgttgaaggcagtttcagatcgccacctttgaggtacatttctttaagcacaagagaagtagaaatggcctttgccttgtctccagtggtttgtccctctggtgcctcagcagataccagagcttattcttatgaccatttggaagtagtcctcaaagtaaagatcaagaaaaaattggattctttttccattttctcataatagtagcctagtcaacacaagactcccataaaatatgactcactattgggagccatactattttataagcttacttcctgctgacaaaactagctttcctcaaggaaatataaaggaggggaaagtcacatagtgttaggaaaacattcctgtgttttgaatacgatgaatccataggatagagaaaaatctgcttgttctattctgagagttctctgagatatcccttcactctgcttggcatttggccattgatattcaacaggtcactgaccaagcttttctaaatttttcagagagagttacttaccaataaggtctgttcttaaacctacctagttgattttcatatctttccataaagtgtcatgattctatcatagaccctgacttaacattgtaaggactatgagtcctccattttttaattaatttttttttagcaaattaggacttcggcaggttttcctctcctaaactcattctttcctccacaggattgctttgtccatctcctgctttcatttcaagtgcataaacaaaacctcaaagggcctgggaaggtgaggcaggccagagtctgtgttctgtgttgagtgtcaagctatttgttaagaaggtctgcaacaggcctttggtgtgggctctgccagagactgttctgaacactttgcttgagatccgtgccctgtaaaatggatatgatgttttactgatgtctgtaatacatttgtaaacttccaataaaatttgaataaaagaaatgttgccattcttctca

SEQ ID NO: 227 - DNA, 6438 bp, Homo sapiens
tattaatatgacatttgtcattgtcactgatttttttaaaaaagcaatgcacatgttggttgtggctgttttccgcatgctatcttcatatctaaatgcttcattaattatccgagcctccggagaattaactctattacgtttgtatagtaagtttgtaaactgcttggcaaactgattaagaaataatttgcaataccgtgctactaaagtggcaggtttctggtagaaattgtgcgagtccaatttggagttttaagttccttgattgatgaaactaaaaaggcaattttggaaaaagagagggggaaaagtagatcacttatcttagcaaacggttgaaaatatgtctgtcctctgtggccccaaatccagtgaaagaaattctcccagtaaaagttgcttcctaactctgtttttctcagaatacctcttacctttctcaaagaaagcttcaaccaccatcatcagaaagaaggtggcctaaaactgacacatggccagtgcccggaggggtctggaggcataagtctagatgcccagagagcatccaggcactgaactgctcagagcttgagatgaaatgacatacaagcttcagggtaaaactgtctactagcaagattacctccctcaattctaccattgcagatttcttctgaccccaaatgcaaccttacagagaatgctgaatgaggaaggccaattccttacaatgatggcagaacccccaagcgaatgccctattgaggagaaggacatcactgtatttggaattctgcctgctagtgatagctcacacatcacatcccagaatcccactcccaatgcattatttcctgaggcaagaacttaaggtcctcacctaattcctccatcacaaccattaactcttattggacaagctcctcctgtgagtagggcctgtactcacttcctcttagatcataattccatcttcaagagactgatttccagaatagtaatctttttccagcgttctctcttctccaatgccctggttgttatttttcccacctctcctaatattgatcttcttgtcttttggttagaactgcaacttcggagttgagttcatttcctattgctgctcaattcagtagcaacatagctggcttgttcccagacccaggaagtataagtcattgacagtttcctgagtggctctgccaatccataccacccttggtactgtgaaaaggcttcttggcagccaggtggcattgaggatggtattcagggcgctttccttctgtcatatagttgtgggatctctaccaagtgtgaaggtgaatgaggtaagggagatcagaaccatgcttcctggtttttcatacatccaaggaagaagtcctggtgtgggttgtttgacaccttcttttcccactttcaccttttattttttattccttcctttctacccccaaccagtcgagcaaatgagcaattttgtgtttctaatacaggatctggaagtagtgctttctaatcctcatttcctgtaggatgttcctgcactataacaagattatgttttcttccttctgcagcagctttctgcttcttgggtactactagctattgttcaattcaggtgaggcctgtgatgacatatatgtagcatgtgctctgcgctccctgcaagctgagcagatacattcaatgcatcactgtatactcttgctgagaatgtggatgcagcctcacagatctttgcaacactccaaccagccaggaccagttgatcagaactgatcttattggtctgataaccaatcttatttgtgaactgattcatatctgtctttccactcttggttctcttgccgtagaacaaaaacagtttaggaagcataattacgaacatttaggaaccaatatgtataagtaattcggagactccaattcacctgcccctcccccatcccaggttgtggaggctcgaggaagctgacttcttaggctaaaggacaaaaaaatctctttacctccttggccattttcatgttctctgccaattactataggcagtcttcattttgcagaggtgaggtaagacttcatcttattcttcatgtaatcccaccttctaacaaaaaataaataaatatttaaattccaaggagaagtgttctttgtgtatttctagcagaaaacagatgcttaagcctaagaaggaagatccgtccatgacaaaggaaagtggaaaactgaaccagttatctgaatacttcatgccaggacagttgctattagcaactgttttgcaccttcagggctttaaaatgggctctgcagacagcatttgcatatgcaagactcagtagccaagcctccactgccaattgttgaaggcagtttcagatcgccaccttttgaggtacatttctttaagcacaagagaagtagaaatggcctttgccttgtctccagtggtttgtccctctggtgcctcagcagataccagagcttattcttatgaccatttggaagtagtcctcaaagtaaagatcaagaaaaaattggattctttttccattttctcataatagtagcctagtcaacacaagactcccataaaatatgactcactattgggagccatactattttataagcttacttcctgctgacaaaactagctttcctcaaggaaatataaaggaggggaaagtcacatagtgttaggaaaacattcctgtgttttgaatacgatgaatccataggatagagaaaaatctgcttgttctattctgagagttctctgagatatcccttcactctgcttggcatttggccattgatattcaacaggtcactgaccaagcttttctaaatttttcagagagagttacttaccagtaaggtctgttcttaaacctacctagttgattttcatatctttccataaagtgtcatgattctgtcatagaccctgacttaacattgtaaggactatgagtcctccattttttaattaatttttttttagcaaattaggacttcggcaggttttcctctcctaaactcattctttcctccacaggattgctttgtccatctcctgctttcatttcaagtgcataaacaaaacctcaaagggcctgggaaggtgaggcaggccagagtctgtgttctgtgttgagtgtcaagctatttgttaagaaggtctgcaacaggcctttggtgtgggctctgccagagactgttctgaacactttgcttgagatccgtgccctgtaaaatggatatgatgttttactgatgtctgtaatacatttgtaaacttccaataaaatttgaataaaagaaatgttgccattcttctcagccctccctcactttccagattttaggggtggtctctgcctttgagcatttcaacaaagaaaagaaaggacacaggtatggagggatgagttttactatgaaatattaacctgattgtttaaatcagggtttctaagcctcagcaatattgacgtcttgtgctagttaattctcggttgcagagggctgtcctgtgcattgtaggatgtttagcaacatcgctgacttctactcactagatgccagtagcagcccccagaaactgtgacaactaaaaatgtctcccatcacaaccattaggatggcagttattaaaaataacaacaaatgtgggtgaggatgtggagcaattggaacacttgtacactgttggtgggaatgtaaaatgatgtagtgctgtggaaaacagtatggcagttcctcaaaaaaaattaaaaatagaattactaccatatgctacttctgggctatacccaaaagaattgacagcagggtctccaaagagatacttgtacacccatattcataaaagcagcattcacaatatccaaaaagtgggagcaacccaaatgtccactgatggatgaatgtgtaaacaaggtgtggtgtatacatacaatggaatattattcagccttaaaacggaaggaaattctgacacatgctacaacatggatgaaccttgaggacattttgctaagtgagataagccagtcacaaaaagacaagtgtatgattccatttatctgaggcacctagagtcaaattcatagagacagaatgtagaagagtggttggttgtcagggactgaagggaggagggaatggggagttactatttaatgggtatagagtttcattatggcaagatgaaaagagttctggagacgggttgcagaacaatgcagatgaacttaatactactgaactgtacacttaaaagtggttaagatggtaaattttatattatgtttatttaaccacaattaaaaatgtctccacacattgtcaatgtctccctgttgagaaccactggtttcaatgcattgccttcttagtgtctttgttccttgagaattcttgaaactgattcctacccaggccacacagttaattttcagttattagcaagaattgaaagcagcagatgacccaaaaatatttgtgtttgcttttaagcaaataataagtggtctgtctggagaattacatccatgtctgtgttctggttagggcagcattaacactgactgggagccaggaccaaggcagcatgtaaattcaatttccccgtgtctgatccacaacattagggacttgctggatgctataatatcatctattcattcattcaacaaatatttatcaaaaggctttctctagccaggaaccgttctaggtgcttggaatacaataatgtgcaaaacaaacaaaaatccctaccttaaaggagtttacaaactttactttcaactaggcaagacattcggaatagtaagtagtcttacccaccctagctaatcacaaggacttgggagtggcagacaacaagagttgtttcattgtaagacattctaagagcttttgaataaaaacttgaactggaaatggcaattgtgcctgttctgcttacagacatgccatagagcatggcctgcaggcaaccatggtttttaatatacagcctccctgtttcccctcttcagccaaaatgattgtagtcaggtatagcaccctaccagcaatcttataagcatgataagctggacttatcagattcgctctctcaagaatacaggctgggcacagtggttcatgtctataatcccagcactttgggaggctgaggtgggaggatcacttgaggccaggagttcaagaccagcctgagcaacatagcaagacccgcccccgcccccatcgcctccgtctctatggaaaaagaacaaaaacaaaaaccagtagctggcataatggtgcaaacctgtagtcccaggtactgaggaggctgaagcaggaagataacttgaggccgcaatgacttatgactgtgccactgcactccagtttgggtgacacagtaagagactttgtctctaataagattaaataagattataaaccaagaaattctgagagaatgaggcagctggcagtgggagtggaagctaagagaatgtatggggaggaaccaggaggtggagtccagcacaggagcaacaaggtaagaggaaggatgaggaagcagatgcaacaaataagcaaaagtctaggctgagagcagatctaagagcaaagacaagagatcagaatggacccagaggagctggtcctcaggacttcctcacctccaaacagatcctagttcctgccctggaggtacccctctagggttaccatttgattttggtccttcacatacccctccccactgtgcctatgtattgtgacaatacatacctatgtaacctctttgggctcaagagttccttgcaatcccaattaaaacatatgaaggatcccatatgcactaaatgccagttgtgcaccttttattttggccccatgttcctttaacattttaaatgtcatctcagccacttgctacttgttgatcttgggaaatgtccatatcctctttgagcctcagttcttaatctattaaatgagataataacagaagagtcattattgggttattgtgtggatgtactggaataatacgtgtaaagctcttagtgctacctgtcattataaaagctcaggccgggcgcggtggctcacgcctgtaatcccagcactttgggaggccgaggcgggcggatcacgaggtcaggagatcgagaccatcctggctaacacggtgaaaccccgtctctaataaaaatacaaaaaattagccgggcgtggtggcgggcgcctgtagtcccagctactcgggaggctgaggcaggagaatggcgtgaacccgggaggcggagcttgcagtgagccgagatggtgccactgcactccagcctgggcagcagaacgagactccgtctcaagaagaaaaaaaaaaaaaaaaaaaaaaaaaaaaaaaaaaag

SEQ ID NO: 228 - DNA, 941 bp, Homo sapiens
ttttttctatacaaatttgttacatgtcagtgagacctttttcaaaggaacatattcaatttggctttttgtggctgaaaaaacataactgttagacccaaagcattttatgctccgttccatcttaaggagccatccttaagtctgctcccaccctcagtagaatttattttctacaaagtggtagtaatttttttttaaattgcaaatgtaatttttgccaattagagaaaccaaccggtgtcagtaaaattctgtgagaaatgccatccctgctgggaatgttgaagttacttaatgttgatctatcccttggggaaagtaaaagtgactgtgagtggtgccattgtgtgatgtcagcatgacgttgttttgaatgtggcattatgttctggtgctcatgtttcctggattgtattatctgctttcctttaccaaggcagacagaactgctgccttagcctgacaaccggttgtcctcaaagcaaatgaacttaagcatttgggattgagggacagaaggattctgagggggctctgcgagggacggtgtgtgacatgtcatgcctggagaaggaacaaggctatttgaaaacagaaggcaggtcaagggtagaagttaaaggagaatctgaaggcaggtcagggaaaagaagaactggaaatgaaacagaggacaggtgacaaccacctcgaagagctcccagagattgtagaaagagtccagtgtaaccagcttagtaaccagagtatctggattacccaggaaggttgagctgctgagatttcagtggtgcaatgtctttaaaaaaacaggctttgttgggagggtatttccattttgaactttgaggactgttggtcagaaaatgggctcaaaagtgagtttgcttaatgaagacatttaacggttgtgctgtttatagtaaaataaaactccc

SEQ ID NO: 229 - DNA, 432 bp, Homo sapiens
agcaaataataagtggtctgtctggagaattacatccatgtctgtgttctggttagggcagcattaacactgactgggagccaggaccaaggcagcatgtaaattcaatttccccgtgtctgatccacaacattagggacttgctggatgctataatatcatctattcattcattcaacaaatatttatcaaaagggctttctctagccaggaaccgttctaggtgcttggaatacaataatgtgcaaaacaaacaaaaatccctaccttaaaggagtttacaaactttactttcaactaggcaagacattcggaatagtaagtagtcttacccaccctaactaatcacaaggacttgggagtggcagacaacaagagttgtttcattgtaagacattctaagagcttttgaataaaaacttgaactggaaa

SEQ ID NO: 230 - DNA, 941 bp, Homo sapiens
ttttttctatacaaatttgttacatgtcagtgagacctttttcaaaggaacatattcaatttggctttttgtggctgaaaaaacataactgttagacccaaagcattttatgctccgttccctcttaaggagccatccttaagtctgctcccaccctcagtagaatttattttctacaaagtggtagtaatttttttttaaattgcaaatgtaatttttgccaattagagaaaccaaccggtgtcagtaaaattctgtgagaaatgccatccctgctgggaatgttgaagttacttaatgttgatctatcccttggggaaagtaaaagtgactgtgagtggtgccattgtgtgatgtcagcatgacgttgttttgaatgtggcattatgttctggtgctcatgtttcctggattgtattatctgctttcctttaccaaggcagacagaactgctgccttagcctgacaaccggttgtcctcaaagcaaatgaacttaagcatttgggattgagggacagaaggattctgagggggctctgcgagggacggtgtgtgacatgtcatgcctggagaaggaacaaggctatttgaaaacagaaggcaggtcaagggtagaagttaaaggagaatctgaaggcaggtcagggaaaagaagaactggaaatgaaacagaggacaggtgacaaccacctcgaagagctcccagagattgtagaaagagtccagtgtaaccagcttagtaaccagagtatctggattacccaggaaggttgagctgctgagatttcagtggtgcaatgtctttaaaaaaacaggctttgttgggagggtatttccattttgaactttgaggactgttggtcagaaaatgggctcaaaagtgagtttgcttaatgaagacatttaacggttgtgctgtttatagtaaaataaaactccc

SEQ ID NO: 231 - DNA, 780 bp, Homo sapiens
ctttcaagacaatggatgtggatatggccgaggaacatgccagggcccagatgagggctagatgaatatcggggatgaagcgctgattggacggtggagctgggatgacatacaagtcgagctcctgacctgggatgaggacggagattttggcgatgcctgggccaggatcccctttgctttctgggccagataccatcagtacattctgaatagcaaccgtgccaacaggagggccacgtggagagctggcgtcacgagtggcaccaatggaggggccagcaccagcgtcctagatggccccagcaccagctccaccatccggaccagaaatgctgccagagctggcgccacgttcttctcctggatccagtaagagtttcggtagagaaatgagactctgcaggagggctgcggaggggggtgagatgtcagagggagggccggggtgggggcgctgggggcaacggcaacagcatggacggacacttattttgttacgtacacccctccctggttcgcgtgtgtccacggatgttgtcactttggtttcttgtgcttttataggcaccgttgacgaactgcagcgatcttactggccaagccagagcgcctcctctcagattccttctcgacacagcaccctaggcggcttcttcctgtcagtcggaggtggcatgcaagatgaagctctctttgctcttcctgctttcattttgtgcttttccttgtgttttcatgttttgggtatcagtgttacattaaagttgcaaaattaat

SEQ ID NO: 232 - DNA, 1262 bp, Homo sapiens
  misc_feature (395)..(395): n equals a,t,g, or c
gtacctggaatacaagaagatccccaacagcaacccacctgagtatgaattcctctggggcctgcgagccgccatgagaccagcaagatgagggtcctgagattcatcgcccaggtaagggagcgcctctgttgggtgcccggcacgggggtggtgctctccacaccttgcttgtttcttggtcgaggcctccttcccattaccccgtattccagtgagggtacaaacactcacagaggcacctgagcaccctacacaaggtcacagatggggcaaaatcccaggtctggcacaggagagtaggagccccaatccctgtggtcctgatttttgccatcattgcacaaagcacacgggagggggtgaggcgggcgcgggtgctcagccagtgtggngtagctctgtgtctatgcctgccctttttctcctcagaatcagaaccgagacccccgggaatggaaggctcatttcttggaggctgtggatgatgctttcaagacaatggatgtggatatggccgaggaacatgccagggcccagatgagggccagatgaatatcggggatgaagcgctgattggacggtggagctgggatgacatacaagtcgagctcctgacctgggatgaggacggagattttggcgatgcctgggccaggatcccctttgctttctgggccagataccatcagtacattctgaatagcaaccgtgccaacaggagggccacgtggagagctggcgtcagcagtggcaccaatggaggggccagcaccagcgtcctagatggccccagcaccagctccaccatccggaccagaaatgctgccagagctggcgccagcttcttctcctggatccagtaagagtttcggtagagaaatgagactctgcaggagggctgcggaggggggtgagatgtcagagggagggccggggtgggggcgctgggggcaacggcaacagcatggacggacacttattttgttacgtacacccctccctggttcgcgtgtgtccacggatgttgtcactttggtttcttgtgcttttataggcaccgttgacgaactgcagcgatcttactgggcaagccagagcgcctcctctcagattccttctcgacacagcaccctaggcggcttcttcctgtcagtcggaggtggcatgcaagatgaagctctctttgctcttcctgctttcattttgtgcttttccttgtgttttcatgttttgggtatcagtgttacattaaagttgca

SEQ ID NO: 233 - DNA, 1134 bp, Homo sapiens
aaggcaataggtcggggaaggtgatgaatgttctgtggggcatgtcaaattgggtggaacctctggggccttctgtgggagatgcccagggagcacagatttaggagatgggagcaactagtgtgatggtggtgagggctggttgaaaccctggggagtatgtggagctcatctgtgtttccacagagcttatctcccaggagatagccatcgggagtgccttgcctggcatgttcccctgctgaggtctgttacccaggagcctgcagacacaaagagcaggctggtaatgctgagaagcgaacattcagtacctgtcaccagaacccagcatgggtgttcaacactatctggtgactctgtgagaagaccctatgctcaggggatgaagtgtgttgcttgtgcaagagggatggagagagagtgttttccaagtatatgtgtgtgtgcatgtgtgtgtacccaggtggaaccctcctgcatgctcacatatgcctttatgaatactggaatctctaaacctaccatcatgcatctcgtcttagcttcctacctctctctttctacccctgcaacagccatgttattgccagtaacacatgagaagagtgagggagacctgtctgtagacaagctcagtgtgctgctaaggaggcaggcagcagttctgtcctcatgcgttcccattgtgccctgtcctgggatggcaaatgcaaggccagacaggctctgggctctctggtctgaccactaatagcatcttctcctcccgctaggctgaccagcctccaaggcaggactctgacaccagggttataaatgcatctgtctgggcacattatctaaattgttatgtatcaccctgggtaatggcaaaagtaaaaaccgctgttagctcagtgaataaatccttggtgctgatcaatcattgcacgacatagactcttttaataggcacaatttacacagaggcttggcagactgcttcgtcttctaattgccgatggaaaatggatgccgatctctgctgtgccgtaaaaatgtaaactataaatgacttaaaaacttgtgtgctcccttctccacccagcactcattttaaccttttatttagaaacaaaacaaagaaaaaaa

SEQ ID NO: 234 - DNA, 1561 bp, Homo sapiens
gtgtccagctgcctactttctgcccggatctctggctcctcatctctccggtctccgcagactaaagccctcgggatatgcagcagccatgcctgtgcacacgctgagccccggagccccgtccgcccccgccctaccttgccgcctgcggaccagggtccctggctacctgctacgggggccggcagatggtggagcccggaaaccgagcgctgtggagcgcctggaggccgacaaggccaagtacgtcaagagcctgcacgtggccaacacccgccaggagcctgtgcagcccctgctgtccaaacagccgctctttagccctgagactcgccgcacagtgctcacgcccagccgccgagccctgcctggcccctgccgacggccccagctggacctggacatcctcagcagcctcatcgacttgtgtgacagccccgtgtcccctgccgaggccagccgcactcctggacgggccgagggagccggccgtcctcccccagccacccctccgcgaccgccgcccagtacctctgcggtccgccgggtggacgtccgccccctgcccgcctcgcctgcccggccctgcccatcacccggccctgccgccgcctccagcccagcccggccgccgggtttgcaacgctccaagtcggacttgagcgagcgcttttctagggcagccgctgatctcgagcgcttttttaacttctgcggcctggacccggaggaggcgagagggttgggtgtggcccacctggcacgggccagctcggatatcgtgtccctggcagggcccagtgctgggccgggcagctctgaagggggctgctcccgccgcagctcggtgactgttgaggagcgggcccgggagcgcgttccctatggcgtgtcggtggtggagcgcaatgcccgcgtgatcaagtggttgtatgggctaaggcaggctcgggagagcccagcagctgaaggctaggcgccactgggcctggaattcgccacaggacggatcttacagaggcaagtggtccctggacctctcttgcatccattctctagacggccgtgtcagaggctccaccctgttgtgaacttggtatggaggcaaaggcttagaggctggaccagcattgttgggcaaggactgactctccaagggttttgttcttggctttggacacctgagaaccccctcctcccctcccccaatacaaggtttttgacatgagtgtactcctgcttagttcctcttgtggggctgcatttgcggtgctttgccctccccactgtgagtgaggggccaagggatctcctcaatcctgtctccccagcggctctgtttcctccttccttccttggcctctgtcctttgctgacttcctcttccttacccagcagaactcaccctggggtcggggcagtggggaggggcctatccactgctcttcctagtccttggcagctggcctaggtgggcagactataggagggactggttaggagtctgcattgctttgacttccctctccttggttaataaacacaaatgcttgtttctcaa

SEQ ID NO: 235 - DNA, 1561 bp, Homo sapiens
gtgtccagctgcctactttctgcccggatctctggctcctcatctctccggtctccgcagactaaagccctcgggatatgcagcagccatgcctgtgcacacgctgagccccggagccccgtccgcccccgccctaccttgccgcctgcggaccagggtccctggctacctgctacgggggccggcagatggtggagcccggaaaccgagcgctgtggagcgcctggaggccgacaaggccaagtacgtcaagagcctgcacgtggccaacacccgccaggagcctgtgcagcccctgctgtccaaacagccgctcttcagccctgagactcgccgcacagtgctcacgcccagccgccgagccctgcctggcccctgccgacggccccagctggacctggacatcctcagcagcctcatcgacttgtgtgacagccccgtgtcccctgccgaggccagccgcactcctggacgggccgagggagccggccgtcctcccccagccacccctccgcgaccgccgcccagtacctctgcggtccgccgggtggacgtccgccccctgcccgcctcgcctgcccggccctgcccatcacccggccctgccgccgcctccagcccagcccggccgccgggtttgcaacgctccaagtcggacttgagcgagcgcttttctagggcagccgctgatctcgagcgcttttttaacttctgcggcctggacccggaggaggcgagagggttgggtgtggcccacctggcacgggccagctcggatatcgtgtccctggcagggcccagtgctgggccgggcagctctgaagggggctgctcccgccgcagctcggtgactgttgaggagcgggcccgggagcgcgttccctatggcgtgtcggtggtggagcgcaatgcccgcgtgatcaagtggttgtatgggctaaggcaggctcgggagagcccagcagctgaaggctaggcgccactgggcctggaattcgccacaggacggatcttacagaggcaagtggtccctggacctctcttgcatccattctctagacggccgtgtcagaggctccaccctgttgtgaacttggtatggaggcaaaggcttagaggctggaccagcattgttgggcaaggactgactctccaagggttttgttcttggctttggacacctgagaaccccctcctcccctcccccaatacaaggtttttgacatgagtgtactcctgcttagttcctcttgtggggctgcatttgcggtgctttgccctccccactgtgagtgaggggccaagggatctcctcaatcctgtctccccagcggctctgtttcctccttccttccttggcctctgtcctttgctgacttcctcttccttacccagcagaactcaccctggggtcggggcagtggggaggggcctatccactgctcttcctagtccttggcagctggcctaggtgggcagactataggagggactggttaggagtctgcattgctttgacttccctctccttggttaataaacacaaatgcttgtttctcaa

SEQ ID NO: 236 - DNA, 1561 bp, Homo sapiens
gtgtccagctgcctactttctgcccggatctctggctcctcatctctccggtctccgcagactaaagccctcgggatatgcagcagccatgcctgtgcacacgctgagccccggagccccgtccgcccccgccctaccttgccgcctgcggaccagggtccctggctacctgctacgggggccggcagatggtggagcccggaaaccgagcgctgtggagcgcctggaggccgacaaggccaagtacgtcaagagcctgcacgtggccaacacccgccaggagcctgtgcagcccctgctgtccaaacagccgctcttcagccctgagactcgccgcacagtgctcacgcccagccgccgagccctgcctggcccctgccgacggccccagctggacctggacatcctcagcagcctcatcgacttgtgtgacagccccgtgtcccctgccgaggccagccgcactcctggacgggccgagggagccggccgtcctcccccagccacccctccgcgaccgccgcccagtacctctgcggtccgccgggtggacgtccgccccctgcccgcctcgcctgcccggccctgcccatcacccggccctgccgccgcctccagcccagcccggccgccgggtttgcaacgctccaagtcggacttgagcgagcgcttttctagggcagccgctgatctcgagcgcttttttaacttctgcggcctggacccggaggaggcgagagggttgggtgtggcccacctggcacgggccagctcggatatcgtgtccctggcagggcccagtgctgggccgggcagctctgaagggggctgctcccgccgcagctcggtgactgttgaggagcgggcccgggagcgcgttccctatggcgtgtcggtggtggagcgcaatgcccgcgtgatcaagtggttgtatgggctaaggcaggctcgggagagcccagcagctgaaggctaggcgccactgggcctggaattcgccacaggacggatcttacagaggcaagtggtccctggacctctcttgcatccattctctagacggccgtgtcagaggctccaccctgttgtgaacttggtatggaggcaaaggcttagaggctggaccagcattgttgggcaaggactgactctccaagggttttgttcttggctttggacacctgagaaccccctcctcccctcccccaatacaaggtttttgacatgagtgtactcctgcttagttcctcttgtggggctgcatttgcggtgctttgccctccccactgtgagtgaggggccaaggtatctcctcaatcctgtctccccagcggctctgtttcctccttccttccttggcctctgtcctttgctgacttcctcttccttacccagcagaactcaccctggggtcggggcagtggggaggggcctatccactgctcttcctagtccttggcagctggcctaggtgggcagactataggagggactggttaggagtctgcattgctttgacttccctctccttggttaataaacacaaatgcttgtttctcaa

SEQ ID NO: 237 - DNA, 161 bp, Homo sapiens
tcctctcttggtctcagctgggcctggttctcccggggcaggagggagggggtgtgggtggggcctgaggccccgcagctgctgccttgtgcctgctgattggctccttgtggaggggcgtggtctctaccttataatagggagggcgtcttatcctctca

SEQ ID NO: 238 - DNA, 285 bp, Homo sapiens
gggagggtctgttggggagagagcagggagggattcttggaagtggggaaggtgccagattgagtcttctccaatggttatggcttggtcttgggagggctccccctgttccaggattctggagcctcccgccttccctgcaggcctctgtggagggagcagggcggggggcttttgcactcctccctcccccaaccctgcagccttggggatctgtggaaacagcccctctattgttctgcctccagttggagtgtgagccctcggagggcctgcagctgctgc

SEQ ID NO: 239 - DNA, 415 bp, Homo sapiens
cgccccggtgccagcaccttcctttttggtggtcaggggcagagccacctactcgctgggttaacttaagcaagttgtttgcctctctgggcttcagtttctccatccaaaaaacggggctgttgagaggacctgaggttgagttgactggtgcgtagcacagagcctggagcctcccttgctccctttagcgcgtgccttgccctgtcttttctgctcaggttgcccaggtcttttttctctagcaccttttttcctctcttggtctcagctgggcctggttctcccggggcaggagggagggggtgtgggtggggcctgaggccccgcagctgctgccttgtgcctgctgattggctccttgtggaggggcgtggtctctaccttataatagggagggcgtcttatcctctca

SEQ ID NO: 240 - DNA, 285 bp, Homo sapiens; identical to SEQ ID NO: 238

SEQ ID NO: 241 - DNA, 285 bp, Homo sapiens; identical to SEQ ID NO: 238

SEQ ID NO: 242 - DNA, 415 bp, Homo sapiens; identical to SEQ ID NO: 239

SEQ ID NO: 243 - DNA, 6713 bp, Homo sapiens
tagacagtgtctccttccttgaagatgctatcctctgaaataactgtgagtacagtcgcataaccctaatttaagatgtgcctgctgaacatgtgctctctcagatcctgtcctcagaatgcttttggctcttttctcggtatctcatccttagagtttttattttataccaatgttctggattacatacctggtccagaaatctagacttgtacttctttttaattgcctagttgacatttcaaccttgattaaagattgacaatatttatcaccttttcctcctggaacaatttaggttaatggtgcagccttttttcctagtcaaacatgccaggaagttcagggcaaagttcaactgctccctcttgtcttatgtggtcactgcttctgagaacatccaggaagttctttctatacttgaatcatcttctcagtcctttggggctttactgctatgagtatgaacttttgtgattatttatttcagtcttcatgatggtgctatcacattctacagttgtttatgtctgtacccagtaagctcttttgagggaaggaatcttgtcttctcctattcccagtcttgctcatgcataacagatgcccattcctcctaaatatgaatgctgtattataggcattagtaataatccctgttacattgcagtctgaagtatgttttaaacatacttttttaaagttagaactgacttacaagtgaatctattcttagattcttagatactaactactttagatatttagttatactcaataactaaatatcaatactcaatatctgtttcttctgaatttcagagtagttagaatgtttttcttaagactttgctagaaaggaactggtttgttagtaattctgccatcaactcatggagttataattgccaaatgagttaatttttatataccttaagctatcttgcctacaaaaagtaaaataaggcaggattcataaatgttacttgtaaattgagtgtttcacatgaggccaagtatgattttaacataatgaatatcattgctcctcatctgtaaatttgctgctgctttcatatgtgtatctgtacatagagttatgaatgaaaatccagtaatgccctaaagcaactttcttccatagggtcaaagctcacttaaggtaaacgtgtgaaaaaagtgactgcagtgtgtttgaaaccacaagctgtttctatgtcataaattaacatcagcttgcaagtctctgaaagaaccactcatttgtaattggtatatatgtcacaacctcccacattcctttagcccatctcagggaattattgaaacgctggcagggttagtttcattttgttttggtttttttgggtttttttgtttgtttgaggattttttttttcttttatcatttgtttgctcctgtgtaagcttaatatataatggcagtttggcatctgttcttcgcacatgtctaacccagcagagttatgcaaaaatgatgacttcattttaggtcaaattggctttgttcccagtcctcattgttggtcactttgttcagttctggtgactcattggtgatgttgatgaaactgctcagcctgccagctgggatattgatggcaggtctaggcttcattgttaggtagaagattgaatacttctcactttatacaaatttacattggctattgctcccatgtgttagctagtcttaacatgtttgttatttcgttatcttattagctgacatacggagtggtattattagtgtcgtactccttagcgtgagcatgacaattaagttaccttactaacagtgatgagtaaaccatactctgatctaaacccattgttaccaatgatgtgattatgaagttagctgaatctatggtctacatttgaagaaatagttcagaattctctactacattgtaagttacttgctaatagagattgggcattattatgtactactccccttctcacatcctacccaaagtacacaaggccgtagtaaaatactgttgctactaaaaactaaacatactgtggttgctaatgtcctttacatcttcagcctatagggaatggtacaggcagaaacaagcaccattaagtatattatcatcagtagtgagatctgtatgattaggatatctttgcttaagcccccaaaggaaaaattctctagcattaaaaacatggctggaacatagctaagcagttaacctaattagtagacttattgttaacgttcagtcctaaaaatgaaaagcttcagttgggagtagaaaatatactatgctggtatatagagcaacaaataccctgatgagataaaatgaagtagaaacttaccatttgacattatttgactttcatacatgctactgaaaagtctaggtttagctaagaagcataaataatggcagtacttgtagaggaaagaacataccagctaaaacaagaactgtaatgaatataatggaaagtgtttggagcttgaatacttggcttcaaaaatctggctttgccatttactgttaaaaaaatatctgagaatttatctcaggctgtaaaacagagaagtcataccaatttcaagaataaaatatgatataaagaattgttgaagccaaaatatccagaaataaacagaatggaaggtatcattgctataattatcttttcagaataaaaaatagagtattctttatcctttctgttgtctcacatgacaagcatgggatggtgaggaaatggcatattgcctatgttcgccgccccacccccttagttccaccaccccttcaccgtcacccccagttcactagtgtatcagaatgcatcttcagaattacacactgaagatacaaaaggtccagttggtaagctcatcagtaaataacaaggctttgaaatctgacaaattagctatttttgtaggaagataatagaacagcaagatggaagacaagtgatgagtatcatctgttttgaggttgacaaggtgtgacataaccctgttaatagacacaagtaaaagaaaatcatactaggattggatattagtgagcgagcaccgaccagtagaaacaacaacagcataaatctgttatttaagtatcccaataatgaggttaaaaaaaaaaaaaaaacagaacaaagcatgaaaagaccacaattagtgctggctatgcttagagaggagcagtctcttggtaaactcaggcagtgatgatgaacagaaaatggccgactgatactgtaatagaggcatagaactaaggacactccgtgagctggcataaatacaggggagtctttaagactgaaaaaagttcatgggtatgacacttaatatgactcaacattactgcagaattttaaagcaaacatgaaagcttgagaataaacactagtccctctacttcaagaaaaagcagaacctgtactagaacatgaagaacttagagatcaaaagacagccagaactatgatgaaatattttgaaagcagtgggcacatttttaaagattttttttggagaactttatgaggctgtatgtataattcctatatgtaattttataggaattcttaactgaaagtagttatcaactgctacttatcaggagcagtgttattagggattttaagttaggcatgtagaaaactttctgacaaaagggctattgaactccagccagttcccagtgaatctccaggaggcaccttagaagtcttcacaagctgaataccatgtctttagggtgtccaaatgcttctgtcttgggggagagatgagagatgactgggtgcctttccactcagaacacagtagaccactcactatttatgaccaagcctcacttcttttctattacagttacagattcttttttagtctggaagttagggtaaataaaatttgtatgtttgatttttctcttaggaatgttttctcatcttaactcttatgttatctttatggccaacagatttgctcagaatatatcatcaaaatatatgtattgtattttgtaaaggtgaaaggatcgaaataccactttgacagttataaaccagagtagatttgagaactgattgctcacatcacacttacgaatagtctcagaagcctttaagagaaacttacttctcaatggacacttagaagaatttgatgatcttactgtcataaaatcagtaatgaaattctcagcaaaactatttggtaaacattgcaccctgtatttttacccaacatcttgttatgaaaattatcaaatacattaaaaagttaaaataattttatagtgtactcactacctagatgctaattagcattacctatgcttgctttgtcacatatccattcatcatttcatattattatttgatgcattttaaattgcatatcattaactagagttcattgttggcttttttacataaaattagcatgcaatgaagtgcatagaaatatgtgttcactgaggtttggcaaatgcatatagtgctatggaaataggaaacgttatcaccaccctagaaagtttccacactgccctttccagtcaattcctgtccctacttgaccctcaaaggcaaccactgttcctttgtctaccataagatttttctgttctaacactttatataaatagagtcacgcaacatgtacgctcttctacaaggcttcatttttttattgctgttcttttttattgctgagtagtattccactgtatgacaatattacagtttgttttcttaatttcctattattgatagatacctgggctgtttccaggattggccattataaataaagctgctatgaccattcttacgtaagtctttgtgaacataggttttcatttctttgcagtaaattccttggattagaattgctgggtcacagggtagttttaaaagaaactgccatacctttttccagttcagttttattgtgccctgtattttgtattttgatgtgcataaaggtgtaaactatttttatgatccatattgaagtattagaagaagtgagtttggaataacaatggcattgttcatggtcaaggatgacaattggaactatctgaggaaagcaaagacctgtctgccccagacagctcctcaaggggttcctatgcctgaaactttagcaatatttcactccttgaaaggttaaagcccaaccatggtgatatgttagctagaagaaacagcactggtttgtttatgttactaactttcaccacccgttttcagtaggtaaagtaagactgatcattgacagaaaaggttatttctgtgatgaggttgagggggtagtggaaagcatgtattgctagtaagccccaggtacagctatgtgagagagagtcacctggacagggaagtcccccaaatggtggccagaagagcagaaaacggggtgggaaaaattctacctcacagttttgcataggggatagctatgcttttacgggacattttagcgtttaaaaatattttcaatattgtctctttattcaataccacccagctgtagttttttcacactctgatgactctcttatccactcttttacctctcccagctgttctattacatacagcattcacctgtattagtctatagaattataatcatctgtgtgtttctaatgctcattttcaaaaatatgtatggtttattcgatttttcctattaaaattttaagggctgggaaatttggcttctactgtaaatccttataatgttccacacattgtaaatatgcaataaaaatgttaacaactataatggcagcaggttttggtatgtatttctttgatatattgtcactttggacaataagtttgatttctgttaataaaagttgttcataaaatctagggagaattaagtcacactggtctctataagataatctgatgaattctgcatctttgaatcaatttgagttattttttgtaaaggtttaaattgtttctaacagtgttacctaaaacctttcattaaatcaaaaatgtaacttgtatattctgaaataacctggagtcttagaagacagaggcttctgcttccctctcccgtgaccccaacaatcccttcccacaggcttggcacagaagttcagtgctttctctacgtctcatgttgtcagaaataggttctcaccataatagacagtggtgaaatttccattgttcctactgagaagtccatttttaaggcatcaaaggtgaatgtgtatttagggatggaggaggcatattacaacaaagctgtatttaaaataacacaatcatatcatgctataaacaatagcagttccagaatggctactaaggattttggactgccagactttggaaattggcaagccttataccttgtccaatgaagttaagtacatttgagtgacagttcaacatacaagcaaaaaaatatatagaagacattgtacatttgttattaatggacatgtttactttacatgttagagtatccatccatctctaggttttccattagatgcttcattgtatccacaaacctgtttcaaaccattgaagtgatcttaccattgtgtttgttcaaaataaaattgggagaaaatgtgaatgagtcaatatcaacacttgacattcctgtctttttaatacattttattcttttgtttagaaaattt

SEQ ID NO: 244 - DNA, 15914 bp, Homo sapiens
aaattgcagcactcttgaatgctggcgatgaggaagatcttgtggaactaaagtcactgcagcaacaacttagtgatgtttgttatcgacaggccagtcagctggaatttaggcaaaatctcttacaagcagctcttgaatttcatggtgttgcccaagatgtaagtgtctattctgattcttttcttttcttcaaattatctgaacacttacctacacgtaatttttttcaggtttgcatgcctcctaaattatttttctgaaccaataaaatgaattactggtgggggtaatgagataaaattctttgattttttttaaaaacaagtattttttaagtcattctgcatgcaattcaaccttttattgtctaactagagtgttccaatctagtagaatattttattttgactccttctcaatgtttatgctttataacttagatggaaatggaagtctcaatacttttttgcattctgctgacctgaatgtacttctttgtcttcctggtgcatgcatctgtgtgttctgtcttccagataatgcatattctaatgattcgtccttgtcttgtaacagtgtagtcttttcaagtgtaattgtgataacctcattagatataaacctcattaatcattaaacactttagatgctgattacatcagggttatctctttggtgtccctctgctttagttgtctcagcagttggatggcttattagggatgttgtgcgtagatgtagcaccagctgatggagcatcgattcagcaaactttaaaactgcttgaagagaagctgaaaagtgttggtaagcagattttaaaaatgctgaaacataaggtttttttttttttaaatatcattaccatggttagacaattaagtcaacttacactgaactaattagtattattttcaggaaacagaaaaatagtataaaaagattttattcccttgaggggttataatttatgctgaaaattttatttttcatcgttagttagtcactcctcccttcactgggcctttacccttgcctgtttacccagctatatctacaggtgctgtgtcttgcatatactatgaacaattatttgtagtgcatgcatgaactgtaattagctgtgaaatgttctgtggtaaatcctgtatgcccaaaattgtgttttatgcaatgatttttgttgttgctttatcctaaccttgtgaaaaaatagttggtttggttttttggttcttgtctcaccaaactgggaatattgtcagattacccattctccaaggagtggggtacatttacattaaggggtccagttacattaagctgatgtaggcttgatgtcatttgacatcaaggcctttagaatttttctacagcaggaagcacagtgaactttcctaaaaggtcaggatgtgacaatgggaaggtggggagtcgtatcaaggggggacaaaaggggaaatggcaatggaagagaggaaacaggaacttaaggcagagaactagtaaaaagtggttgcacatgactaaaccaaattattgaaaactgccttagggaattggtttgaaaaatcacacttgtactgacattttacttgcttacagcctttgttattttatttttttgagatggagtcttgctgtgttgcccaggctggagtgcagtggtgccatcttggctcactgcaacctctgcctccccgattcaagtgattctcctgcctcagcttcctaagtagctgggattacaggcacctgccaccacgcccggctaatttttgtattggtagttatagtagacatggggttttgccatgttggccaggctggtctcgagctcctgacctctggtgatctgcccacctcagcctcccaaagtgctgggattacaggcatgagccagcgcacctggccagcctctgttattttaacagatggtatgcataatacatatttagtgtttaatatgacaaatgaattttcttttaaaatattagttttcttgagccacagtctttgtttaaaaaaaaaaagttcctttacacatgtaatttggagaattgtaaatataccctaattgttgcttcctatggtatagaagctagactgtatctttagtcacaatgttcaacatcctttgacattgatgatacattgctggagtgtcttaaaattttgcaaggcttatgcgcttttttaaacaacatgtttgccttgttctcctataagttggacagcataaaagcaggaagaaaaaacagaaaattgttttctattagaaataggaattttcatatttttcttctgctttcattttttaaaagtaattattgtctatggaaacccatgttttcaaaattccctttagggagaatttggcatgagagagagctccaattcgagttacatttaaagggttttattgcttgaaatgttcataggatggagtcttgggattccatcccaaggtggtttactgtacaaagctcctatacttgggatccaggtacaatatctgatgagacgatttgtttgagggagggaaagcgccttagttgtgtaagagattaaatctagtaacttttgttttagatgtgggattgcaaggtttgcgtgaaaaaggtcaaggtctcctggatcagatctccaatcaggcatcctgggcctatggaaaggatgtaaccattgaaaataaagaaaatgtggaccacatacaaggagtgatggaagatatgcagcttagaaaacaaaggcaaagtttgaccgttaattactttttactaaaataataacaatattagttaaaatgaagttatataacattttatatacagacaaaacgttcttaactgttatatagaagacatgtagtaggtttttggtgaatgtgataattactgtatataattttactaacatagtaataatttattcaattattaggtaccattttcctttttattgggttgtaaaaatttcaattatactcaactatttcaaattccatatccccagtgtagtctatgactcttctgctttaaaaaaaacttactgaagaataattttgctttttaaatttcatttagtttagagttgccattaaacttgtcatctacattgatctgtttcttcatctaaacttacagaatgtcacacattcattgttctcatatttgctgtaggaggattaaacagtggactagtgatgtttagtttcattttctataaaactaggaattcaaaagattctttgaaaactcagtttgcaatagcaactacaaagtattgcaaagtaaaggattaaaattatgcaatatacacaatctagcatggttatatgaaattttgcacacttaaaaattttatgatcatcaacaaaacttcacagaaagcttccttctgcatcacagagaaaacagtcatgaggcagaaatttcttccctcatatctgcaaacttacttttattctgtcaccacagaggatgatagagctctccgtttatatcaaaaaatatcaaagctgagcttccatttaggctctgattctgatcaccctcctgactcctaactccatcaaatcccattctctactctggttcctgccctcacttaaatgcttaaatttctcctgttttaaaaataataatcacacatatgggtacgtcttcctcttcaactctttgtcttttagcattagaactcttcctcacagctaagtcatttggataggtttacggtacattcatactacttcccccactacctccaatttattttcaactcttttcagtctgacttctaccctaactatttcattcagtgttgctcttaccagcattaccaacgtaataaatgctgtatcttacttaaagttcagagaatacttttagtcttgacttgcttaactgtgattagcgttaggcacaactgacttttcgatttcatctttcttgaaaacacatttatgatccttctctgtttcttcttggtttttgtcactgatttcttggccactagctaaagttactgcttccagggtttgttctgaggccagattcccttctttatatattctccctggacattctcactacttgaattactttctttaatagatcatggtttagtagttacagctctcccgtgctgtagacccataattccaattgcctacttagtgtcgcctgcgggatgccccatgtactgctgaaatctagtgtattagtccattcttgcattgctataaaaaactacctgagactgggtaatttttcttttcttttcttttttttttgaaacagagtctcgctctgtcactaggctggagtgcagtggtatgatcaaggctcactgcaacatccacctcctgggttcaagcgattcttctgcctcagccttccgagtagctgggactataggcgggtgccactgcacccggctaatttttgtatttttagtagagacggtgtttcaccatgtcagccaggctggtttcaaactcctgacctcgtgatccgcccactttggcttcccaaggtgctgggatcacaggcgtgagccaccgcacccggccgagactgggtaatttttaaagaaaagaggcttaatgggctcacagtcccacaggctgtacaggaagtatggctggggaaacctcaggaaacttccactcatgatggaaggtgaaggggaaacagacacatcttacttggatggagaaagaggaaaagagtgaagggggaggtgcggcacacttttaaacaaccagatctcatgagaactcacttactgacatgaaaacagcaagggggatatgtgcccccatgatccagtcatctcccaccaggccccttgtatttattagtccattctcacgctgctatacctaagacaggataatttataaaggaaagaagtttaattgactcacagctttgcagggctggagaggcctcaggaaacagaatcgtggtggaaggggaggcatctaatcacatcccaccaggctcctcctccaatattgggattacactttgatgttagatttaagtggggacacaaatccaaaacccagatccaaaccagatcacctagtatgtccagactggaatcattttcctctaaaacttgctctccttttttaatttcctgcctaggttaaagttaccatcagctaccaaacttgagatttatcctaaaatccttcatctttctcatcccttatagcttaatcaaatgtccaggttctgctgtctctgaatctcaaacatttatggtcaagatcttaaactcttatctgcctctggcctggctactctccagctttttgtatataagtgtaattttcataaagtacaacaattgtgtaaaacttccttcagtgacttcctgtttgctcagatggagtttgtcttcttggaataatgtaggagacccttcataatccaattcttgcataattttatcttctataacattcccataaaatcacacagttgtttttatctccctgaaagcatcatgctgtttcatgcatccatgactaagaatacttgtttccttgttttctgctcagtgaattcctacttactcttcaagactcagggatacttactttactttaggaagcctttttggacttctaaggcaagttagtcacttgctcctccctactctcataaaacattttaaatagctttataatagtacttataacatctctgcaaatgggagcatcttgatagtagagaccatatcttatattttccccagcacacattatctaatacctgaatacagtatatgtatgataccatcttcatcaaagtggcctacattgttttttagtttcatatttaaaaaataattatcacttcccttcagtccattgtagaattactttaaccaagttgaattttaatgtcatgttatagcttttattcagagcatctttatttttttttaaaaaaaagccttgtgatacctacttctatattgttattaagctttctttaaggacatcaagtatagtagagcacagtgtctggtaacatattatcggtatttgagactgcagtgggagtcccccatcccacctgcagtacgcagaatttcatggaaatgaaggaaatggaccagagttaagttaggttaagttgccttaaaaatttaaatggttatattatccaaaaagaccacaatgagattaaaaaaataatttgaattgtgtttctctacacccagaggtcagtagagtttttttgtttttttaagccctccatctagtttttaagaatgtagatggagggttttaaaaaaaatcagaattaaatattattttaggtactataatataatgaaaagcgttaatgtttaaatgtttctttagctgggcatagtgatgcacacctgtagtcttagctacttgggaggctgggatgtgaagatcatttaagcccaggagtttgaggttatagtgagctatgatggtaccactgcactccagcctaggtgcttgagtgagaccttgtctcaaaaaaatatcatcctgtatttgagaaacattacacttttatccttgaaacttgtttgatgctaaacagcaatggagattttttttgggttttagtgtactattgtccttacattttgctttaatattttgcagaatccatgctatctttaagagggtttgtcattgagtatcatttgggtattttgatgttttgatgtaacattgatataaatatccctaaaattcttacaaatcaatacaaaatacttgcattctccattgtttaggactaagtattttagtgtactataaaatacatgtaccaaatgatgatgttacaatagtaatcaataaaacagaaatgatgagttaaatttatgtttgggttcattagatgtgaagacatggtagatgtgcgaaggttaaagatgcttcagatggtgcagttgtttaaatgtgaagaagatgctgcccaggtaaggagcagtcagctacattatgtagttaacttttcttagaagattgattttatctaactacaaacaaaagtgtacttttcatggtcctaaaaaagtaaattcttgaagtcaggttctagtttatctatcttgttgaagaatacactttggtattcccagctagttgattgatctcatttaacttaattttctcaatgaaatcctctataatcctctattgagctagagattgggatcgtttattatttattattgttgattaggttgtcagttacatccaggataaaatctggtggagcacactgcattttgctctcttgcatctgcaagagaaatttcaataccagataaacaatttgatatattttgtcgttatcatcagagaacatcatttcagttagatatagataaaatttttgattttatgtagtaacacaaatctgtaatgcaatcctgatggatctacatacagaaatacatgatcttttattatgtgatattaattttaaaagaatgcttttcttcagtatgtcttgccttcagatttaaagaattttgaggagtaggacaggtcattaattcatgtagcttatcattgaatgaaataagcttttaagactttaggttataattaacggatttattaatcacatgatagtaatctctgtataaatgacattttgatacaataagtaaagagttctgaatccagcttcattgttatgtctttttgtttaggcagtagaatggctaagtgaacttctggatgctctgcttaagactcacatcagattgggcgatgatgctcaagaaacgaaagttttgctggaaaagcatagaaaatttgttgatgttgcacaggtgcaaaactggttatcttccttttccacaagctcagtgtttgaatagctttctgcatgattataatgtaactttaccttccaagtacaagaaggttagttttgttattccagaagtgtcacagaattaagaaaatgtcagctggtgcatcaaaactagcctgcataaacttgagagggtttacgtttccctgaatacatgttctgcatggtccctctgatttatgctatgtattacggcatttttaaggcaatccaactgttcatccacagaagttaatatgaaatggatgttaatatcagtaaataagaaacctcactttctgcatcacactagtgttagcataataatacagaacttttttgtggtgaaaagtgtctttttttttttttttaagacacagtcttcctctgttgcccaggctggactgcaatgatgcaatctcagctcactgcaacctctgcctcccaggttcaggcgattctcatgcctcagccacctgcgtagctgggattacaggcaccggccaccacgcctggctagtttttgtctttttagtagagatggggtttcaccatgttggccaggctggtcttaaactcctgacctcaagcgatccacccgcctcggcctcccaaagtgctgggattacaggagtgagccaccgcgccaagccaaaaagtatcttattttccctaataatgagttcacgttttaacagatgtagtttcctatatggaatataaagtgcctaatttcacctacttttgaaagtagttttgattaattcataagcagacattctttctggccagtgaaatttaagcagactgcgatgggggaaacagaataaagtggggaagcctaacagaaggagacttttttctaattaaaaattttaaaacaatttttgtttttttgagacaaggccttgctctgtcaattaggatatgatgtttcagcacaatcatagcgcactgcatcctcaaactcctgggctgaagtgatcctcctgcctcagcctccaaggtagctaggactacaggcaagtgtggccaaactcaactaatttttttcatttttttagagataggatcttgctatgttggccaggctggtcttgaactcctaacttcaagcaatccacccacctcagcctcccaaagtgctgggattacaggcatgaatcactgtgcctggccatgaaacttattataaactaacaaaaacatagcttcccctttattacttatacacacagatgatttgtagtaataagtgccactagatttattcagtattgatttctagtagtgtcacttaactgtaacgacaatcttcctgcacactttccccatccttctcttaagaattcttttattacaattttatgtttccttttcttttttagagcacttatgactatggcaggcagttgctacaggccacagttgtgttatgccaatctttgcgctgcacttctcggtcatctggggatacacttcctcgactgaacagagtatggaaacaatttacaatagcatctgaagagagagtacatagattggaaatggctattgcatttcactcaaatgctgaaaaggtttgcttgtgtttttgaaatgttattctcagtggtattgattatatgtgtttaaaatatgttaattttagtaatgtaactatatgactaatctatttttcaatatttatattagttccgttgttacggtttgtttagatataatacattgccttagagagttcaaattaaatttccttaatccttaccagtgctggagagccatgattggagaaatccagaaccacctggtagtcttcttctctttacacttctctcctcaccaagcctggtgtccagaatatgccctctgttctttagagtatcatgagttcaatctctttcgttatgcctggaagggaaactttttgctttggcaactgctattaattgtcacacattttttaaaaggcaccttgtgattttataaagtcgggacattaaaaaaataagaataaggacaaaagtaaaatgcttttttatatgtgttctttaaagattcattctagaatttattattcaatgaattaaggtcattaatttcagaaacaaaaaataaaatatgcagggttatttggacacattttcaatagaacttttttcttactcttcatagtaagaatttattctacccaagccttacatatccattctgaaaaggaactttattatgtagttaattttgttttgatctcttacaataaaagtttatatgtagggaatgttcgatacactttgagatattagcaaacctaacttgatccatggaacagatgttgcaaggaacctcaggaattaaagtttctatctgagttatgaagtacatctgttgggaagggtccatagttaactcattctcagctggtcattgaactccgtagatcagtgtttgattaacatgggcctaatgatgataagtggaagtatacaaaatagtgtaacttgtttatctactgattgtttcaatgagaattttttattattatgaagtatactattaacatagaaaacataccacaagtattctgtgcagtgagatttcataaagtgaacacacctgtgtactcagtgtactgttcaaaaaaaacagaacattaccagcacccagaagctccccccaccctgtgtaatcacagtactgctcccccaatcacctcactgtcaaagggtgacaattggcccaatgtctagcaccactgataacttttttttttttttttgagacagagtctcactctgttgcccaggctggagtgcagtggcatgatctcagctcactgcaggctccacctcctggagcttgttgtacaaacctaagtaaagccctttgttatcagatattactttcctcttgactgtattctattttataccataagcataaatataaataaccacaactataagcaaattgtatagtataatgattagaaaaatatctaaattaaatcttgagttttaaaatacaaaaatgtccgttcatgagtaatgctgaagtaaacatgattagataaagtgtaatgcaaaaaaaagttgtaaaaatgaatactttttattctctctctcaaattttgcagttcttgtggtttaatttaaatggtaatggttagggtggagtgaagaacagtatctcatcaaggactatagagattaccatatttgaattataacctaatcattttatggcagttaactcaagccagcagatcagttgttaaatattatcatctagctgagttgtcacatcagttatttatttgtactctttgttgttttttatttatataatttttcatttgtaatgtctatatgctctttgagaacacagtctatacctccttcaccttccagactgctacataaacataaactgttcaataaatggttacttaatataaatgaaagaatacttcttaaggacagattgaacttattttccaaatagtagtctagttattttctttcttggaaatcaccatattgttagtaggaattatgtatttcattttgtttgtttgaatttcttgaagaattttgccaataatagatcaatcttatatagtggtatacctgaagatgctaagaacaagaaaatgcctttaatctaccaaatttgtatgagcttgattccatttctgtgtctttcttttctctctttttttttgtggggtggggtgatcctctgaaactgcagacctgtctgtgtctcttgattgatgttgctcttttatttgttgcagattttgcaggactgtccagaagagcctgaagctattaatgatgaggagcaatttgatgaaattgaagcagttgggaaatcacttttggatagattaactgttccagtagtttatcctgatgggtatggggcatgttcttataattttattttttattggtgtggtcttaaagtgaaatcattaaaagaggaaatctattctttaaaaagccaagtaaattaggtttggtccacatctttaactcctacgatgaattagtttaaaatgaaaagaaatccacacctcttagccacagtaatggtacttgccaacaacagatgcgttacttcttgacagcttgttgtagaatgatcattgactagattaagacactgggttctagccttggctatgatggtggggaatagtgtgacttggggcttcattcaggaaaaggaagaggggacaagggattgatgtttagtgagttcacaatatatgccaagtaccaagtgaaacatttcaccttcattacttttgaccaaagaggaccaaaccagtatgattattcctgatttacaaatgaagaaactgaggcccacagagattaagtaaggctctcaggatttcacagcttctaagagttagcataaacttacaatctcaggtatgtctgtgtggctccaaacccattccctttgtactgtgttatatggcgttctaatttctttatgtgtgaaggaatggggtcctgattatcttacacctttccatttcaaatagtgataaaaatatgaaataatctgatgcaaaataaatggatcaggaaaagaatcaggaagagcttcagccgggcgtggtggctcacgcctgtaatcccagcagtttgggaggccaaagcgggcggatcacaaggtcaggagatggagaccatcctggctaacacggtgaaaacccatctctactaaaaagacaaaaaattagctgggcgtggtggcgggtgcctgtagtccagctactcgggaggctgaggcaggaaaatggcatgaacctgggaggcggagcttgcagtgagccgagatcacgccactgcgctccagcctgggtgacagagcaagactccgtctcaaaaaaaaaaaaaaaaagaatcaggaggagcttcatccctggtgatttagacctgattcttactgaaaataatttagagataatccagaggatatttaattcaaatgatagagtaaccaaaccagtgaataaaaatacaagtacctttaacgttgtggtatagtgtgatgagtctgtgcactctggagccagaggtctcagctctaccacttactcactgtaacaccttgggcaagccacttaacctttgtgcctcaattccctcatctaaaaactgccatgtaacactcataccttcctcaggttatgggggtgtgggaattacctgagctaaataagtataaagtacttaaaacagatctgacacataataagcactgctactactgtgccatgatcttccagtgattatttgggattgatattgaaaagatggcattttattcccttgaaataatattattcatagtctatacttacgttatctcaagccccacctaaacttgaacaatcagaggtagcctaaagtcacctaaagttgtattacacatctgcaataaaagacaacaaaattcagctagtagcagaattacaggcgtgcttctggttgttccattccaggatcccttaccctccctgattcctacatttcacagccagttgtcacacagtcagtctcctgttctacccatgtcagcctaggaacacctctccctggtatgcttgcttcagcttctcgtctgtgtttcacagatagtccatgtgtcatttcctcatccatccttttaagataaaagaatgttagtactatatattcaaagttcacacccacctttaatattttggaattgctgttttattccactttatattcatattaaaacttatgtatatctcttttaggtattttgctgaattaaatatttcccaaagttgtgtgtagtgttttccataattattaatataatggtaatctgtttatgccatgtatagtttgtttgacaggttagacagatttctcttttataccttctcctggtaaaataaaagagattgatggtctctctggattcactgctcaaagacctaggttcaaattctggtttttccctgggtgaccttgcttacatcatttaacttgctaggctccacttttctgatctgaaaaataaagagattaacctgataatttctaagaaatcttccagctctaaaaatattctgtgattctgaatacagtatctttgagagtagaataaaattaataattttatctgttaatgtaccaaaaaatgtcataacattaaaaagaatatttattttgcttgccagctctatagacaagtggtgtccccagccggtagcactcaagtacctgtataaattttatgtttgtgcatccttctggacccacatatttccagtgtttcattgttcaatttgttgctattatcataactacacatgatataacctttataccatcaatatatttttctcatcatgtcttaatgtattttatgccattttaaaaaatgtttttcctgctgaatttcctgctcaaacagtatgatcaccgatgaactgatatttacacataggctatctcatgtagattttttatggtaaatttttgcttctatttgtattcactgcagttaatagatttgtattaatctgaggtttttctgtgtgttttgatttttagaaccgaacaatattttgggagtccaagtgacatggcttctactgcagaaaacatcagagacaggatgaaactagttaatctcaaaaggcagcagctgagacatcctgaaatggtgaccacagagagctaatagctaccagctacctacagatttgcagttcataatcccgcatgttgtcaacatactacagcattagccaccacaccttaagatgcatttcacagccaaaataagtctcatttcttttcatgacacatttctctttacatgttaacaccttgctactaccaaggcataattacttaacatgcttcgaggctgtagattccaagtatcttaaaagaaggaactataaacattgcactgaaaacttgctttaaagctttacctgacctgtcagtttgtagacaaacaactgataataagctttgaatggtgctaataagagtaggaattctctctattaaaaagaaaaaaaaaagttgcccttcctccacaggtgatttagtaaatttagacagtagttaaactcttgttagtagacagtggtgtcctcaaaattttactttgtaattcttcagaattgattatttttattgtgtcaatacagagaaagcctttcagatctttgatatatcatagtcattaaaagaccttttcctatttgtattgataatgtattaaaagttgtttgtgcttaataaaagacttctttaaacatcttatttaatttagtagttacatcctatttccaaacatgagtgccttatttaaaagggcattcttaggactgtgaggatggtttaatatttgttttttcatggtggttgcatgtattttagacaggaaatacatatgtaagcatgtgtatataataaataagcatgttttatcatgaaaaattattgtgaacaatttagatctttaagaacttattaataatggaatactatttctaatttttctctttttcaacttgaaaaatattctcaaaattattaactaccctgaagatactttgtctttaggggaggagggctgaggaagaaggcatacataattacttcagtgtaatcctttatatcagagtaatctttcaggaactaaaatagcaattgttaataaaatttagtttctcattatagtctaaaagcaaaataaattctgaagtagtccaataacagaactgtatgacccctttagaaataaaatttatcatgaaatgctagttcttttaagtttgtattaagtttaaatggtaaaatgcatataatttaaattttatgtatttttatttcagaacattttttaaaatattaaaaattattttttagtcttgtagtcattacaaaattataaacgagttgtatactggttcctttttgaggtctacaaacatgctcgtgtatcttccaatgc

SEQ ID NO: 245 - DNA, 217 bp, Homo sapiens
gagaaaccaaacatgtttatgaaattaacacgttctgaaagattagcacatccaatctatggtaaattttagcaaattcaaaacagagtgaagcctgaactgtcattttccagcatctcatcactaagggaaggttgttttcaactggaaataactaattcctttatgctttattatttaaatttctgtttaagaataatgtgtagttattattttt

SEQ ID NO: 246 - DNA, 22008 bp, Homo sapiens
gcggttccaagtgtggagaaagcggctctgggtctaggtagtgtgcggagaggggcgcggggtggaattgctgcgggaagtgggaaactggaagtgggaaactggaagtggaatctggtgctccggaaagagacgttcccaacttctactttctccccagattgagggatactccccctttccaccatgggcaagaagggcaaagttggcaagagccgacgagacaagttttatcacttggcgaaggagacgggtgagtccggattcgctcagtctgcgagcgagcgagcgatctctgcccggttcgcctgctctttgcgaccattatgtacctctcctgcagaaggggtggtcggttgcgaggccggagaaatcctactagtgaagcagtttgcgcacttggttgttttgtccaggttaccgttcccgatctgctttcaagctgatccagctcaatcgccgctttcagttcctgcagaaagcccgagccttgctggacctgtgtgctgcgccagggggatggttcgtaacactcgccacaggttgctcctggtggccgctttctgggttctgagctgggatggcttccagtttcactgcgggaggggaacccgaatcccggtcctcttgggggccgtttcctttcttgattgcagagaaagggcttggaatacgtgcctatgatatgctttggccagtacacgtaacaccagggatgagagatcagttgccaagagggggaaaaggatggctctaggtttttaaatttctgttccttttataggctgcaggtagctgccaagtttatgcctgtatccagccttattgtgggtgagtaacggacagctctccttggtgttttaaggggtgggtgtataaggtattttgtcctgtatttctctcctccctgcttgaagcaaccttttagaatactctgacctgatttcttccaggagtggacctggttccaatcaagcctctccccaatgtggtgactctccagcaggacatcacaacagaacgttgtaggcaggtaataggagtctctctcttccttccccctttatacggaaacatctacatccctgaaatcctctaaaggcaagtttttcctttttaccgtgctttgagcacgttcttgcctgacatctgtacgacaagacctatggcattcgtagtgtccactccaggctttatttagagtcagggataaaggtgtttggaattgggagaagggcagagatctttagtgaagtcttctcctgtgaattcagtgtcagactgtaatctccatgaaggtagagacatactgtttttgtttactattgtatctcctgtgcctggtactgcatttggcccatgatgggcactcagcaaatgactagatggacaaatggctgaaccagggccattccagtgtttctgtttccatagttccttttcttctctttaggccctgaggaaggagctgaagacctggaaggttgatgttgtgctcaatgatggggcccccaacgttggggctagctgggtccatgatgcttactcacaaggtacagggagtgtggtgcttggagatcaggtgatggtggaggtgggcgcatgccctcctgggctgcagagtgcgtcaactaattgtctctatcctacagcccatttgacactgatggctctacgtttggcttgtgactttttggcccgtggtggcagcttcatcacaaaggttttccgttctcgtgactatcagcctctgctatggatctttcagcagctgttccgccgtgtccaggccaccaagccccaagcctctcgccatgaatctgcagagatctttgtagtctgccaaggtgggcatcatttcctttctcttgatccaggctcccaactcccaaagcacactttttaatatatcctgtcatttttaggattcctggcccctgacaaggttgacagtaaattctttgaccccaaatttgcctttaaggaggttgaagttcaggctaagaccgttactgaattggttactaagaagaagccaaaggtgtgttttggggaatggggtcactcttgggtcctggaactctagggaggttgggcctggtgggtcctacaggtaccttagaagggcctgaccaagcttctctcttttccttcctaaggctgaaggctatgctgagggtgacctcactctctatcaccgtacctcagtcactgacttcctccgagctgccaaccctgttgacttcctctccaaggccagcgaagtgagtctccagccttgagggacatgaggtagccccagaaacatggcctgaggatctcccctgacacctttccatcctcccaaacagatcatggtagatgatgaagagttggcacagcatccagctaccactgaggacatacgggtgtgctgtcaggacatcagagtgttggggcgcaaggagctcaggtatggagtggggtaggcacgggggccaggagccctggaggcagggaaaggccatgatgttggacctctgggaagaggatattgctgtgctaaaggtttgggatgggggcctgagccttttgatttatgtagccgaagcccgaaaggtgggtagtgagcctaaaacagaagggggcggggacaaagagggagatggcaagatcagtaatagtatctctggggcaggtcgctactaaactggagaacaaaacttcggcgatatgtggccaagaagctgaaagaacaagcaaaggcactggacatcaggtgaggagagaacgcagcgaggcaggtgtggactgggtgtccaggggaaaagtctgggaaaataacccaactcttgggactgttttgccagcctcagctctggagaggaagatgaaggtgatgaggaggactcaacagctggaaccacaaagcagccctctaaggaggaggaggaagaggaggaggaggaacaactgaaccagaccttggcagaaatgaaggcccaggaggtggcggaattgaagaggtgaaaggagctggggtagagcttggagttccccaacgcagggactgtgtgaagatgggagaagaaaatgcaaggcatggatagaaactttggagctgggccggttttactccctcaatccaccccctcaggaagaaaaagaagctgttgcgtgagcagagaaagcagcgggagcgtgtggagctgaagatggatctgcctggggtttccattgcagacgagggggagactggcatgttctccttgagcaccatccggggtcaccaggtgaggcggcattgggggtgcaggtttaggagacagaaggatctgtttgggtgtttggaggtggggggtgttgaatgtctttttaggttgccgaacgataggctgtggttgctgtcttcaccacagggtgccttggtgagtataaggccacaaagaaacataaaccaaaaaggatgagttaggtagatagatgagtgtgatagatttattttttttttttttgagacggagtcttgctctgttgcccaggctggagtgcagtggcacgatctcggcccactgcaagctccaccttccaggttcacaccattctcctgcctcagcctcccgagtagctgggacaacaggcgcctaccaccacgcctggctaattttttgtatttttagtagagacggggtttcaccgtgttagccaggatggtctcgacctcctgacctcgtgatctgcccacctcggcctcccaaagtgctgggattacaggcgtgagccaccgcgcccggctgatagatttattcttgaagaactagaacatcagaaaagaacttaggttatagtagatgctgccaggttacttgagtttcaagcacagatgaatagaggatctccctcagaggggagcagcattctttagttcattgagaccaagtgagcactcgcattagggtacttccactgaatactgaagaacatgtttttcctgacaaaatcagggtcacaaacaaaatgaacttttgtggcttatgtgtgggagtgtcataatcaggtcatctttgttgtacaggagggcagtagagcatggtggccctagagcagacacaggctcaggtttccttcccagctctaccacctggagctttgtgaagtgactgagctgactaccacttatccttgctgcctcagtttcctcatctgtaaaacaataatagaacctacctactagagtttttggtgaggaataaaaaaagataggtgtaatccctcatatgtgataaacactcaagaaatagtagttggagtttttcctttgagacaagatcttgttttgtcacccaggctggagttcagtggtgccatcatgactcactgcagcctcaaactcctggcatcaagcaatcctcctgcctcagcctcccaaaatgctgagattacaggtgtgagccaccatacccagcctagtatctttaccatgaggaaaataaaaggttctgacaattggtttaagtggaacagttttgttggatgtatgttggctgggccccttttattcagtggaaacaaactgtgtagacggtattctcaggagatgattgagatgctgtctgagaataatttttaaaggaaaaccagtgttgtagaatatgttaagatttggtgctatgtgggctgtaggtaccttccttaagacctatttgtgataccactgagacaagacagctgagtgggatagatcagtaacccagcctagaacgggatgttgtaaacaggccattcactaccctggatctgagctttcccatctgtgaaaggataatggatttgccagtgttctttctagtgttgctgagcatagactgaggtgagggacacagaaaaaaaaacagtatatttccttttaaatagtttacctttgtttctgttacacttcagttattagaggaagtaacacaaggggatatgagtgcagcagacacatttctgtccgatctgccaagggatgatatctatgtgtcagatgttgaggacgacggtgatgacacatctctggatagtgacctggatccagaggagctggcaggagtcaggggacatcagggtctaagggaccaaaagcggtaaggggcacgtgtgcaccaaagggaatgctgccactctgaggaagtgttagggtgggtactaccagagcctgagtagggcagcaagggctccaggcaatctgggtctctgagccccctactttcctttgggtctacagtatgcgacttactgaagtgcaagatgataaagaggaggaggaggaggagaatccactgctggtaccactggaggaaaaggcagtactgcaggaagaacaagccaacctgtggttctcaaaggtaaggagaggccgggggcaagactgcggggagatgagtcttccttgggagaagggcagctgatgttctcctatcacagggcagctttgctgggatcgaggacgatgccgatgaggccctggagatcagtcaggcccagctgttatttgagaaccggcggaagggacggcagcagcagcagaagcagcagctgccacagacacccccttcctgtttgaagactgagataatgtctcccctgtaccaagatgaagcccctaagggaacagaggcttcttcggggacagaagctgccactggccttgaaggggaagaaaaggatggcatctcagacagtgatagcagtactagcagtgaggaagaagagaggtgagtagttgcagctgagagaagggatggaaaggaagcggtggcttgaaccatttctctaaattgggggttcttaatcttggctgcacatggggagggttaaaaatactgtactgacgatcctgatttaactggtctggggtacagcctgcatggcaggatttttgcaaattccgtgggagtgcggtctgagtagtacagagtggtggaatcactcagagtcctcccctcttcacagctgggaacccctccgtggtaagaagcgaagccgtgggcctaagtcagatgatgacgggtttgagatagtgcctattgaggacccaggtgagagctctgtatgcagtggaatgagaaaagaccactggaagtctcagtattgggaattgagctttgacctttctccttccctctctagcgaaacatcggatactggaccccgaaggccttgctctaggtgctgttattgcctcttccaaaaaggccaagagagacctcatagataactccttcaaccggtaaaggggccataaactcatcaagagtgacccagggtctggtgggtaaatgggtaattttttgtttttgagatggagtctcgctctgttgcccaggctggagtgcaatggcacgatcttggctcactgcagcctgattctccttgaatcgcttgagtcagccttctgagtagctgggattacaggtgccaaccaccacgcccagctaatttttgtatttttagtagagatggggtttcaccatgttggccaggctggtcaaactcctgacctcaggtgatctgcccacctcagcctcccaaagtgcagggattacaggcgtgagccaccgtgcccagtctggtaatttctttagaaagcctggaatgttggatattagacagatgtcctttccactcaggtacacatttaatgaggatgagggggagcttccggagtggtttgtgcaagaggaaaagcagcaccggatacgacagttgcctgttggtaagaaggaggtggagcattaccggaaacgctggcgggaaatcaatgcacgtcccatcaagaaggtggctgaggctaaggctagaaagaaaaggagggtaagtgatggggcctccagagattgggtggggtgggggtggggggatggggaagaggtcacctgacaggttcctttgcagatgctgaagaggctggagcagaccaggaagaaggcagaagccgtggtgaacacagtggacatctcagaacgagagaaagtggcacagctgcgaaggtaatgggaggacaccacaaaggtacacagggctaaaagtgcagcagaaagcaagcctctaacctcttctcttcccccctgtagtctctacaagaaggctgggcttggcaaggagaaacgccatgtcacctacgttgtagccaaaaaaggtgtgggccgcaaagtgcgccggccagctggagtcagaggtcatttcaaggtggtggactcaaggatgaagaaggaccaaagagcacagcaacgtaaggaacaaaagaaaaaacacaaacggaagtaagcagagctgccaggctcccaggagagcatggggactaggaggaagggtgtggcatggctcagtctggcccccttgattaccggcctagcccctgctcacatcacagctgtctgaagaacagtgaggtggagtgcctagaactcccgtggtggtcctgagcagagaggaggatgtcctcctgcctgcctgaaggtctcccatgaaaacactgctgaactgtgttgacactcatgaccctttttttaaaccgttaaagggaagttcggtgttggagcgatactcaatgtagtcagtctacacctggacgtgtgggccacttaagccctccccacccccatcctattcctgaataaaaccaggataatggaagagttgtcttttctgacagttttaataagcacttccctatctgtccctacactgtgtgcggcactattcttaatatgtaccaattcatagacagaaatgacaaacgatccacaggtcccggtagtaaaacatttactagagagcaagcagaaaggaatgcacatcttaaagaaaccttcacaaagtcacaaaagtcaaagtttgtatatttcttttcctttttataaacgataaacaaaaatcatcaaaatcatttcagcaaaagacttttctatcattggggcaagttaaaaaaaatacaatgagatagaagacactttaaaagctgttgttgggtttcttgtttaattttaaatttagcaataccatctcaaacctggagcaatcctggaacagttaccaggatcaccttttcccttcaatccttgtggcttctgggaatcttcagagcctgggtctgaaaggtgtttcctacatgtctcagggctggatgcaaacctggctggggacctgagcatcaactcccatttagaatcagacatctcccttccctgcaaatgtctacaactaccaaattgctccccaacagttagctcaatggattgaatttgcagaagccaactcctaaaatggggactgcctggccatacaactaagaaaaagaagtcaatttatagatgcttataaggtgacaccttagtaaaaaatataagctacatacaatataaacctagagtgagttttgtgccctagaagaccctttatcccaagataacctcaacttacccacatgacaactcacctagagccaaaagaagcttcccagctctcactgcttccaaggaccaaaacagcttcccaagaaaacatccgaaaattccttctgatgaaggggtaatgtctccaagctccagctctccactaagggcagggggtccttacactttggaccccaacccagccctgagacacctagttaccaaaatctttctaaaaattaaggacaactgatttcacgctttagcacatcccctctaactgtcccatcgacttttcttgcgtttaggcggctctgggacagcaaagccgtcagctgtcttatctgtcttgctgtccaccttgtccatcttgctgctgtccactttgggttccatcttgggctccatcttgctctcacgattaaaagcttctttcctgctttccccattccgaccatcatttgcaccccggttctccccatgccggcctgcgcttcctccatgtctgttctccccgtgccgatggccatcagtatgacggctgctgctttctggatggcggtatccatctccatggcgaccaccatctccgtgacgtggactatcgctatgccgattgccagtctctccgtgactgtgacggctgctgccccggttctcagtatatctctctcttttcccgttgctgcccccagtcccttctcggctgttattccctgaagctgtgttgttgactccttgggctccggcagacgggtaggtcacaggggcaccactgatgttgccagtattgccaaagcctgggatgcccttggcggcactggtgacggggctgtcaggactgttatggccctgttgtgctgagttagttggaacagaattcaagctccctgcactagtccacccacttgccccagcagcagaacttccagccttctgattacttaaactggctgcaacaaagtgactcttgtactgtgactgaaagagaaagagacatcaggagtaggtaagatagcaagttcaagaaacttgaatatacaacttggcaaatgatgaggtttacagaaactctgtgctatcctggcactgtgagtttagtgtcctgatggccccacagtatggtcccttttgttcttgtgctataaaggaaaacttgtggatctctgtggagagatggacccccagtgttctgaaatgtacttttatagcctgattggctagaataaagcatctatgtatttagcacatttatctgcattcaaaaccaaaaagttctgaaaacttaaaaaaaattttcatactgcaatttaagtttgacagcaaaacctgccttgaactcattctatcgattcaccttagtgtgactatcagtaaattttgcttcagaagtgagttggaggtgggtgcctgggaggtgggcaacacttcaggctgttgggaagggagggaacacacaccctgctgcaggacaacaatcccaggccccaagtgtgactcaaagtagaccagcacaaggggttctctagatcaacttgcatttccaactaagctactgttaggtttatattcaaaatccaagcagcgtgaagaccctaaatctagcatcaagcctaggcgcccagctacaaccaggaaaactaagcccctctgtcactgcccaagagttactgctgaaagtgcttttaatgaaatgcttatttcagacctggaaagctgctttcattgccgttagtcgatctcccatagctcctgtggaaggcttgtaggcctcataattgctcattacattgttatttcctcgatcctaaaaaaataaacacatctatgagaatgaaaaaataagcaggaaagctcactgctatagactaggcctcattatgaaaacccttgaagtgggagctacaaaggaactggatacttttagaaagctgctactgctttgtgagaaaagacacagtgacaatcatttaaaaatgcttatgccctcaacccagaaattctatttctggaaattaaccctattaaacagaaatgcaatcagattatgcccaaagttgatcatgtatttacataaacacttccaattaattaagtaaaaattacgttaaagatgaaaaggccctgaatagcatattgtgtgactgctcaggccctgaatcaagaccatgaagggtctgaatttcggcttgaacacttgtcactgtaaccttaggtgcctcagcattgttatctgtactaacttccattcagttattttgaagattaactgagccaaaacatctgattgcttggaatggtcctggcacatataaagtgctcaataaatattacctattattatgcatcatcatcattattattataatgtgggaacagagtatgtaattacaaagatgccaagtttaatgctccagaaaagtatactggcagctttcttccctggcttggaatcaaggtgacagaaaacaggcagttaagaaaggccaccaaaagggtacatttgttacctggtttgtgagaaaaactagctcccgacttggaaattcctgatccgttcctgagtttaatgacaagatatggctagactttacagtgaccctttggcaacatttacctagcagcaggctttaggccagtgttgaagggcttataaaaccagactgctgggccccaactccagagtttctgattcacaaggtctggggttggggatgagtttgcatgtgctgctggtccagggaccacagtgtgagatcactgctaatctagaataatttcctgagcaagcctagtcaaccaagtacacaaagatgcttcttcaatagaaagttaccataagaatgagcactgcattgactcaaatcagattaaatacaaattcccttctagacagggctttaaactcactgaggctttcctgggtagatgagaatattcctaatgactttcaggacatgagaccaactataaaggcactactgtagtagtctagactcaccatgttctcagagcccaggccaggccgctccctgtagcctaggcctcctccaccaatgttcagcttttttcctttccctcctttgaatcgagatttccgaaaccaggcattctgcattgaacaaaattcaaggttaagtcaagggagggagaaaagaacagaagaagagaacgaggacaaagaggaaattaagtgggaagggggaacttttgcttaattttcagccagcactacgctaagggaggaattttcacaggaaccacagattggtttctctttggtagcataatccaccaaatttgaaaagtggctgagatccttatctaaggcttcctacagtgctccctccctcaaggctctcctggaagggaagttgttcaggtaagcttcaaacccagaggagtaactttggctacttctaacttccttgaggaaaatgagcttatattttatttctcaaaccatgtattattggacgtaaacatttggaacttaaacaactggtatgttcagaagcaaaggaaaaatgctatgtgaagtgaggcttatcagaactgactatagggacagactcccagaaaggatggtagccacacaactgaaaattttatttacccgcagagcgtaaaagttttcattgaacttgaccattgccactcaacatatttactcacattctcttaagaatgcagggcggtggctcacgcctatgaatcccagcactctggaggccgaggtgggcggatcacttgaggccaggagtcaagaccagcctgaccaacatggtgaaaccccgtccctactaaaaatacaaaaattagccaggcatggtggcacatgcctctaatcccagctgcttgggaggctgaggcaggagaactgtttgaaccggagacgcagaggttgcagtgagctgagactgcgccactgcactccagcctgggtgatagagtgtgactccatctcagaaaaaagaaaaaaaaaaaaaaaaaaaaaaagcaaatgtctctgggaaggttaaagttttatctgacaatcacatattaccagcaaaataaagtgcttgagaggtagggcagcaggcttggacaaagtcctgagcacagaaagcctgaggtacaaaaagaaatggaagaaaatgccaaagtcaaaatgtgtcctgttttaaaagtttatttaggactagctctctgtgctcaggagcaggggaggaaacattattctcttctctcctgcagtgcaggtcctttactcctaggaccagaaacttgggcactgccacattgcagctgggttgtaccagttgtgtgagctggcctaggcatttgacaaactcttaacagtttctgctctcagaaagtgttccgaacccatttgtaatttggggacagcatggattcagatgactccaggtttgatttgttagaatgcctcacttagctttagattggagcacacctggaagagggcaatcagtgtggtcagaggtctgagatctctgcaaggaacagttaagaggcaccatacaggctgggcacggtggctcacgcctgtaatcctagcactttgggaggttgaggccgaggcgggcggatcacctgaggtcaggagttcgagaccagcccgaccaacatggcaaaaccccatctctactaaaattacaaaaattggccaggcgtggtggtgggcgcctgtaatcacaactgcttgggaggctaaggcaggagaattgcttgaacccaggaggcagaggttgcagtgagccgagatcgtgccattgcactgcagcctgggcgatagagtgagattctgtctcaaaaaaaaaaggtgggggggcactatactatacacatattgttttaaaggcatcacacatttttagcctcccagaagaaaaattttgtgggggaagagcagtaaggagaatagtaaccatctttgagattaaatttactcctaagtgtgctatggggtagaaattacagcgacagattttagcacaaaggaatagcttttcaaaacagatgctgttgaaagaagaagaccagataagactagatgaattttagtatctcacaattcctatctgtacctcataagccccacatcctcctagccacccaactttcttgtcaagtttttatgttatctgttccaggactgctaaaatgtcttggtcttataaccaggagcaattgaaagtgtgcccagcccctcacctgcattgccagatctaggagttccttagaaacgtgttgattggctccttccaagttccggaccaggtcaccagcaaaattgctgtccttgggagtgagtagggtataggccacacctttctcacccgctcttcctgtgcggccaatcctatgcgtgtgggtatcaatgtctcgtgccacatcatagttaatgacagtcttaattgaaggaatgtccagaccacgggctgaaataaaaagcaaccaaattcttttattcttcatctgtagtcagaagatcaaagtaaccagaaatgctagtgctaataagccacatttcctttatctaggcaaagcgcatgggtttggtgagctgagatacaggcatgttaagtcaccaccacagattctatgatgttaggccttctagtgtaagggacttttattttttagagacggagtcttgctctgttgccagacgggagtgcagtgccatgatctcggctcactgcaacctccgactccctggttcaagcaattctcctgcctcagctttccaagtagctgggattataggcacgcgccaccacacccagctaatttttgtatttttagtagagacggggtttcactatgttggccaggatggtctcgatctcctgacctcaggtgatccgcccgcctccacctcccaaaatgctgggattacaggtgtgagccaccgtgcccgactgggacttttatcttttgcatcagtaatctgccatgccctcttctcttgcactgggaatatatatttaaaatgtgtcatgaagctgagaagttctctcctttctaggaaaaaatatcagtgtttaagggtagttattaaaacttgacagaacaaatccagaaattatattccaaaaactgttctcatcctgagttaagttgcccaactaagctgtgtatagtagatcaatgtaagggtaaggtatctactatattcagacatacaataagggcattcactgccttttttcccagagtgacttctagctgcagggattctttgattagagagaaatactaagtgaaaagtggtatctagagctccagactgtgatccctgtgctgaactgctgcttccttgggggtttgggaggggatggccagccaggccaacagtctttccatcagcctgctcagatattataggtcttatgtagtaagacagagtacccttatagcctaggaacttaatgttgttgaaaaattcatactctacctgcaacatctgtggccaccaggactgggatgtcctttttcttaaagtctgaaatgaccttgtttctctcactctgatccatatccccatggagcagcccaagattatgaccctcctgtttaaggttattcgctagctcttcagcattggcttttttagtaacaaagaggaggacactccctgaagaggtaaattctaccagacgccgggtaagccagttccatttactaggtccagaatggagaatctccacaatctgtgtcacatcttcatttgcctgagaaggaagaaatgaaacagatgattgtgacattggagccacagggcacctgaacaaggactaggcattatatttctacctgcatcgagaagaccttgaacaatcccagttctccttgggccttcagcaagtcaagtgcagctcaaaactcacctctcctttccaatcaccttgctctccacctggtgtacatacctaatttgtatgccccactactttgtagagctttccttaacaataaccatggcaagcaactgaaggattctctaagcagccataactgaattccaagtcccaattcagagtaatttttcacatagcgcatatgtacaggtaagaaatgaaacctgattttttccaggccttccaggtcaccctttccctcctgcgtaggcccctaccacaataattaaaacgtcagttccaacctaatacgctgatgcttccaggcacatctttttgtctctttgaagcctttttaaaacaattgtaagttttgagacattcaataaaacaaaaaaaacacaaaatgaacaaaatcaactcatacccatcacctagcttcaatgattcccaacattttgccagtcttgttacgtctatccccacaacttgcaaaatacccaatctcaagcatgttgcatctataaacataacatcttttttttttatctcaatagtgagaaattaattctgtgttccataatatgagaaataaacccattaaggtcccatccagccctgcttagggttacctctccaatatctccctgcaccactcgaatagggtcgatcaggatgtctctggccaacttttcaatcttcttccgaaaagttgcactaaataagagagctaaaaggtaagataaattctgttagagaaacaatatgatatctttatgcatacccattaagcttctttggcattcaggattattcagtttttttacataagctcacctgaactttaaatttagtttagaaactgattcactagggaaagatttgctcttattctatttttattacatttttagttaagacaagttgtcagtatggttcagaaaaagactcttgatttcaaatcagcagatctgtactgtacactgcttctacccactgataaaactgtataatttagggcagtttatttaatttctgatccttggttttatcatctataaaaaggaacaagttatatctagtgctaagatcctgtccagctcagataaactcattacctcccttattatggttctcaccaacagacacaagatcatttttacttccataactctgagtgcttataaaataaataagtgccctttttagtacaaatttggtttaacaaaggtgcttcatacatactctgcctgtcaggacgaacatgacttgctatggatcgaacttggtactctgcaagaaacagaacaataaaattattataacctgaaatacagtttgggaagcctggaaaaagccatattagtaaaagtcttcataagaagttgtaagaattaagaaaattagaaaccccaggccaggcacagtggctcatgcctgtaatcctagcactttcggaggccgaagcaggcggatcacttgaggtcaggagttcgcagcctggtcaacacagctatctctactaaaaataccaaaaaaaaaaaaaaaaaaaaatagccaggctgtggggtaggtgcctatcaccccaactactcaggaggctgaggcagaagaatcgcttgaaactggaaggaggaagttgcagtgagatcgcaccgctgcactgcagcctgggcaacaaaagcaaaactctgtctcaagaaaaaagaagctcctaaacatatcattcagcataaaagtgaaaaattttccctccatccaactgggctaggtctagcagtgttccaatcagtaaagacagctacgaggataggaaagcaaagggcctcgaatgatctgacattcatctacccaagaacacagaccttaacctctatgatcaaaggcatatggataaaaatgaagacagagaaaatattccccttatatacaaaggcactttgaaatttcctcaacccaataaaacctaacatacttttccagagaaaactcctaaaaatgttcatcttagctatatttctatagtctaaccccatccaggagtatttttagcttctctcatgctgaaaaaacagtctagaaagacatggaaaaaaaactagtatcatgaggatggggacagaagaaactggtattcaaggcataccaaatcccatgtcaaacattcgatctgcttcatcaaacacaaggtaagagactctttgaagattggtagctttctttttcacatgatctatcagtcgaccctataagatcaacaaaatgaacagtaagtataattaaaggcattcacagggactttctaagcagttgcactcctggcaaaagtgctaattctctagtctcagactgtaatagatactggtccaacagccacataccttatgcactacttagctcaaaggaacagaaattttgaaaactcaatcggcatcttcatttacactgtgatttaaattctgtgggaaagtggccagaagcagtttttgaggcattctaaagtgacctgatttaaagcataatgacaggtttcaatgtttaaactacactcttctaggctattctgaccatatgtatctttctgattcttgatgaacttggcaatcattttgtgggagagtataagaaaaactatttgacatagaggggaatttgtagctactagcctatatgtcacagagactctcactgaactgctaatttagccaccaatcaaaattaaaaccacagcctgccgttcatcagtatattttcaaccctgcttttaccacactttaggggaaattctctgcaaaactaatcatgttttccataccgagggaggctgagaagccatttaaacacaaggcatacttactggggtacacacaacaatctctgccccctcctgaagggccttggcctgctcccacatactccctcctccatatacggccactgatcgaagattatatgcttttccaaaccgcttacattctgcatggatctacaaagttgtgaataatatattaacaaactgtgacactaacaaatacctgtcacaacccaaacgaagttctgaaaaacagaatgtgatgtcataaaaaatcgaaacctagaacatactttaaaaccacgattttattcataaaggtataaatgaatggaataccattattgcatctcaacagattatctaaaatcttttattcattttacccccttctcttcctgatcctgtcactgcttttctaccaagataaaatgaactcatcctacagaaaaactgtcagcttataatacaaacaatccccatatcacaataggcttttcctcttaaaaaaagtagttctggccgggcacagtggctcacacctgtaatcccagcactgtgggaggccaaggcaagcagatcacttgaggtcaggagtttgagaccagcctggccaacatggtgaaaccccgtctctactaaaaataaaaaaattagccaggtgtggtggcgtgtgcccgtgatcccagcctctcggctgaggcaggagaattgcttgaaactgggaggtggaggttgcagtgagctgagatcacaccactgcactccagcctgggcaaaagagtgagactctgtctcaaaaaaagcaaataaataaaaataaataaaaacagtagtttttaggggaaaatatgtatttggttatatagaaaatatttaacacataatactttccaaaagtttcctggtagcacaacactgtgaatatacttaatgccactgaactgtacattaaaaatggttaagataatcaattttgtgtgtatcttatcacaattaaaaaaaaaagtttcctggtcattctacctcacttgactggctggtcccttgctagtccacatatggaaggaggcattctatagaaagcacatacctgctggcaaagctccctggtaggacacacaatcactgcaattggtccatcacctggttccaactccttctggtccattatatgaatcaacatgggccaaatgaaggctgcagttttcccactacctgttttggcaataccaatcatgtctctaccacttaatgccacaggcacaccctggagaaaaagtaaaatataaccactctaaaatttcaattctaaagatgtactgaagcaaatcctggggaatgataaatgactactaacatttttatttgcaatggaacaaaacatacctggtgctatgcatactggttgtgaaatagaaatatcaatatccaacattctcattaacttcttgatttataggaaatgacatcattctcattacgtggatatcagccaccacttacagaacagaaacaactccattttgtttaaaatacagaaatgaaaaatcaaggccgggcagtggctcacgcctgtaatcccagcactttgggaggccgaggtgggcaggttccctgagctcaggagctcgagaccagcctgggcaacacggtgaaaccctatctcaactaaaatacaaaaaattagccaggtgtgctggcgtgcgcctgtaatcccacctacttgggaggccgaggcaggagaattgcttgaacctgggaggcagagattgcagtgagccaagatcgcgccactgcactccagcttggacaacagagtgagactctgtccccaaaaaaaacaaaaacaaaaacaaaacagaaaaattgcaatttataatgaagggttgctaaaattttaaaaattttccccccttaagaaggtacagactatctcattcatatacagaaaatgagaatgttctgcataagaataaataaatcccatatataaatgggaaaaagaagctaaaactttcagtaatgaatgagaattttcaagtgacgaacgaaggaattctagtcattgacagtgctaaatttgtctatatacgaacctttttggttaggtttaggcctaataaattattttcttcatatcatattttcaacatacgtatcagatacaaaagaatatttgtcagccatttagtgacttcttaagagtgataaatacctctatccttatcaacaaggttctacactaaacactgttttactgctgtgatttgtttttaaattaatatagtcatgaaagactaccctactttatttttctttcattatgttttacttacctggcactgtattggagtgggctgtgtgtattcagatttccgaatctggtgcataagttgttcgtcaaacccaaaatgagcaaagctacttcctggtctaggaggtgcagcaccagagacctagagatagagacaactccccagaatgacttgtacttcaacattaacagcatttgaagttcaacaatacttacctggatctagcattttagctggagtatgaagtaaaaatacaagtctgtaagccaaaatcatacaatgaaaaggaaaaacctcaaatggtaacaaatataaacctcatattaaaaactccatgataaatattcccaagataattgtcatacaattttaaatgattaaaaatttcttaactcaaaattaattttctcataacaaataaaacggaaaaaaaattgttcaatgaattgggaagccataactgttcttttgccattttgcattaagtattaaccagatggtagaaaaaaattaatgtatcttactcttgaaatgaaaattccaagtgggctccaaataagacaagtctacacatgctggctaccaagatataatctactgcctccattttcagttatgcttgatgaattaaagtctcacttagtgatggtccagccactgtcaagccctgttcaaactgcacctaggtgaagaatggggcttataatctccattttgtcccccaaagtggtaacctttcaatgcttctctggtgatgttgatatttccaatcaggatttcaggggttttacttaaaatttttcttgggtcactggggagatgagtaacctcttggaaaacagacaagtgtacacacacaaatacacacccctcctggaaaacaggagtttaaacatcgtgtagcaactgataaggtgcacacaggcgagaaagttgtctatattagagtagatagcatagcatattttttctgtgtgtttcatttaccatctatcagcaccttaaaccaatgtagccaatgtgcagcccaaaactttctggtaggcagtttaaaccattctgaaattagtacatgcatatttttaaaaggtattagtttattctaatttttaaaataaagcatactatatgtaatttgacagacaagtttatcttcatttcaaaatattctaagatatcatctgttaacatctattccttttgtttcctcttcctttagatggggactcccacccttcatcactagcccatccagcacagaacatataaaactgactgaaatatgaaacaagaaaatgatcctatcctaaaacagcatctagaagactaaaacaatcaaattaagagacatgaacagaagggatataataattactctggcaaagacagttcagagaccattagaaaagaaattcaaggttattagtttagataaccaataatactaaatctggactaattaacattaatattaagaatattgagcttaatgatgcttacccgaagattgagcttatgccggagatctattaactgctgtggagtgaggttggttatctcttcatgctcattgtaaaagtttttttcaaatggtg

SEQ ID NO: 247 - DNA, 15500 bp, Homo sapiens
caaacctccggaggccggggacggaaggcgggcccgcagcagatcctggatccggaatctcccgggcaggagcggaatctgtcccgaaccgggtctgtgaggaactcgcgaacttggattaggaaatcccggagcccggatcgacaaatcccggaacccggaattaagatcgccaagtcccggatcgcggagcacagagcacggagtggactcgacgcggagcccggagtccggatcgcggcaccgcgggacgggacggagcgatgtcgggccgaggcgcgggcgggttcccgctgcccccgctaagccctggcggcggcgccgtggctgcggccctgggagcgccgcctccccccgcgggacccggcatgctgcccggaccggcgctccggggaccgggtccggcaggaggcgtggggggccccggggccgccgccttccgccccatgggccccgcgggccccgcggcgcagtaccaggtgagcaaggaggacgcgagcggacgggggcgagaggcgctgcgagggcgcccgggccggcggctgaaggggcctcgagtgagggccctggggaatgcatgaggaactccgggagacggtggagggcgggccgggaccctcgggctgcggcgggtcgcggtggagaagtgggaaggggaagcaggttctgcagcggagggctggaagcagctgggaggcctgggggcttccgcggcacagggattccgagtgactgggagatggaggagtttggggagccagtgaattgtggcgggtgggttgagaagtctagggtaggagggctggaaagtgatgagaaagtttgggaaagggccctcgctgagaaaccggggttaccctgcatcggccttggtcccagtccaagtctgccctgttttttctgattgggaactggcggagctctagcgtgtctgagatggctcccggctgctaataaggaggaaggagcctggcttcccacgggcacgggacgctgaggctagggccaggggattccagcttgtgcacgggcggactttactcctgaggcagggccaggcgccttcgctgggaggactccagcttagaccagagacggtggtggcctggcctgaggggaggcccagcccagtcacaggccggctctcttctgggctttctgcctcctgtcatcgtgtccgggagttgattagtctggacgtgcagagtggagccctgctggtctggggccggaggagtctgcgagagttgcttcaaagagtgctgtcctgacccctttggggttttgagagctgctcagattgcagcttcaaaagcccttgcaaagcagcgacttctgctcagtgtgtgaggacctcagcctgaccctgccagtgctctagtctgctgttcaggttgccccagagggcttggaaactgtgcccatctgccttgtcaccctctctgcatttttatttggccttcaggttctaactccaccacgtccgaagccatgtgcccaagcatttgacactggcttcttgctcatctacgggtttgctgtgggcttcctctgttttcgactcatgtctccaggcagaggtccttagggatcctcgtggagtatacacagcctacctgccccactgggccctcacttctaaggagatggcttaactagggacagtgactggatttttttttccttcttactcctcattcttcctcctttctcaagagaaaagagagtctgggtatgggcagagacagacctggtcccagggattccagctggggctcatctctcccaccttgctgtccccgttggggattcatgggcccagggtgttgctgagggctccctgcatcattcattgtagcccttgggcctgcccactgagacctggcctgggcaccatctgtgggcctttggccttggaaggacctggaacagacaagccgctccagtttccttggcatgcaagccataggaaatgtgcccttgggacagcccctgagaggatggattccacatgttttggtggggggtggccttgggcctgtggcaaggccaagctggctggctggttaggcctgggctgctagctgtgcggaagtaggagatggccctgagtctgggtttcccatcccactagctttcctcctcctggcaggagaggtagatgggaaggagaacccagccagctaactttggctgagtttgaagaggatcctatttgccttctttccaagtccagttgtatgactgccaggagaagggacttgagatctgggaaacaaaggggttcctgtctgttagggctcatgagatgcacttgaaaagtgagaatttgaggcccaagctgagcaaatagttgaaagaagggaagtgatgacctcccttcctccagagggtggttctagctgtggatcacagttaacagaggaacctaaaaaaagaaaaagaaaagaaaaaaacctccagggcaggatatggtgggctcacacctgtaatcctagcactttgggaggcccagacagaaggattacttgagaccaggagttcaagaccagcctaagcaacatagtgagaccatcatctcttaaaaaaaaaaaaaaaaatttagccaagcatggtggtgtgcgcttatggtcccagctactcaggatgctgtggcaggaggattgcttgagtccaggagttcaaggctgcattgagctatgatcctgccactgcactccagcctgggcaacaaaataacaaaaacctcagattgctgggttcactccagagagttcaaaaagttcaaaaaaaaaattttttttttctgatacggagtctcactctgtcgcccaggctggagtgcagtgacatgatctcagctcactgcaacctccgcctcccaggttcaaacaatcctctgcctcaagcctcctgagtagctgggattacaggcgcccaccaccacgcccggctaatttttttgtatttttagtagagacgaggtttcaccatcttggccaggatggtctcgaactcctgaccttgtgatccacccgcctcggcctcccaaagtgctgggattataggcgtgagccactgcacccggcctcaaaatcctttttactcatgggagagtgggtggtatgttccccaactgaggccctcaggcccaggttccaggagcatcagggccacatttggggcagggcaaagcacgctcaccggagccctggattcctcatctggggttcaggggattgatccaggcctacctggtcctgctgcaggcagggagttagggaggctcagagtgctggactgcttttttttttttctttaactcctgagttgtttttttttgtttgttttgttttgttttgttttttgaagtgggaggagttgctagcgcctataagccctatggagcttggcaaggctcagctgggacttgaactataagcagccttcccctggggccctgagtgagccaggggctctgggcccaggaaacctggagcagatgtctgggtggagcctattccagaccctgcctatgaggccttgtcttgggacttcctgttaccggagcacctgcccaggagggatgggtggtgctgcaggttttgtgaacactgcagcagggagcttcctggggaccacagggccctcgctcacctctgcaggacccactgcttcagttcttccctgtctttgtctcaggcactaggaaaaactagtctgggatgtctgggcctgggcttacagctgtagccacacttagtttttttctataatctcaggccagagaaagaacaatctttaaggcagagaaagaggctgtcttttgcctttcaacagctctgattaatctcttcctgatgcagagagactttggcaggactcccaaagccccagagccccccactttgaactttttattctcccaaacacttccgtcccaccctgctcctcctctccccatcctcacgtctgtgggtcatgtttctttccatctccgcatctggtcaagaatctgaccctctgtgttgggaacatgggtttagtgcgggatgaagaggttggggaagaatctcatctccatgatgctggggtgggggagggtcctttgatttggtacaagtctccaccctgccgggcttggttggctggttgtgctcgttgcataatctgggccctggggccagccctgtgaagctgccagggacagtgtgtgcaaggcagagctgccaaacaggccttgcaggcagcagccatggggaggcgggtgggggtggaggtgactcccagatgggctccacagaaatgtcagggagcaaggcctcaggtgggaaatccttctgcaggcatctaaagaagctatttctgtctcccactttcctgctgctcagcctgggcctctatccttgcctcccaggataatcttagcccccttctccagcttgggattgccagggctacacggagccagagccagtcctggctgccaggtggtgcctggaccactggcagagtccaggtgctagctgctctctttcccacaggccacccaggagccatagcttcccttctggggtcttctgtcataggggtagtagttgggcagtagggaggtaagaggagggtccagttctgggctgtgggtgggggctatgtgataccagactacagggtacagggtccctgtaccctgcccgaggccacccccaccagctggtacacgttccaagccatcctgttgcagccctgctcacctggggtgctgctgcctaccagacccctttctccctcggccacagaggatggggattggggctctgcgccattggcctactcatactatagtacactcctctgcctggcagtgacactgcccctgtgcctctcagccatgcttcttcttcatgatgggagaaagagaaggagggcagggcttggcaggactgtctgagagaatagggaccagcttgcccagggaatagggcacagcatgctggggctggaaggtagcaatgggccctgaaaagctccccaaggcccttccctctgcaggcaggaccctcctcccagcccaggttctggcaggcctcattcgctggcatggctgccagggcggttgcagggggcagggcaggtgtggtttacactctgtgctcaggcgcccactcccctttgttcctggggctccagcagggctctggtgtgctgctcaggccctacctggctgacgagagggatggagggcatgggctatgggtcccggagggccttgcccctgacctatgcacccccgttggctcacttcccccagcgacctggcatgtcaccagggaaccggatgcccatggctggcttgcaggtgggaccccctgctggctccccatttggtgcagcagctccgcttcgacctggcatgccacccaccatgatggatccattccgaaaacgcctgcttgtgccccaggcgcagcctcccatgcctgcccagcgccgggggtaagagcatcctgcttctctcactctgcctaactcagctctggtggtagcagagggtttccttctatcttaagagctttggtgactgaggatgactccaggctctcctgggggagagggtcctggagactggaggggcgttatgggagtgagtgtccttttttggaccattgacctcttaagtgggtttctgtcctccccaggttaaagaggaggaagatggcagataaggttctacctcagcgagtaagtgttaagaggacacctgggaggcctgcccagtggccaccttggggtgggtgtccatctctctcaaagctgggctgcagcaggaagggaggaaagagccaggctttggctgaagcaagctgatgagcttctgctaccttccttcagatccgggagcttgttccagagtctcaggcgtacatggatctcttggcttttgagcggaagctggaccagaccattgctcgcaagcggatggagatccaggaggccatcaaaaagcctctgacagtatgtgtggccctgaccacctctagccttcccaggtttccttgccttccacccccttgttttccaggggccaagcaagttgggctagagccgggtttttcacatgcaggatgcagcccactagtagagtacgaactcagttgaatgtgttggggccagtatgttttaaatgaatatatgacagtagaaaatcttaaaatacttcacagtagtacttaccatagtagtaaatggattctttcatgacatttttgtttctgataaatagatatgcagaccttgggtcataattgaaaatgtaaatcttatgggtggtggtcaaaagtttgaaaaccactagactaggggataaaggtagttcctttctccttccccttccccatccatagagaaattttcttttttttttttttttttttttctgagatggagtctcgctctttcacctaagctggagtgcagtgttgcgatctcggctcactgcaaccttcgcatcccaggttcaagtaattcttcttgcctcagcctcccgagtaactaggattacagatgcctgtcaccacgcccggctaatttttgtatttttagtatcgccatgttacccaggctggtctcgaactcctgactgcctcggcctcccaaagtgctgagattacaggcgtgagccactgcacccagccgagaagcttttcttaataataatgtagaacagtcccgagtggtgaagcctttccaggggactaggatattttggagccgtgatgggtgtttgggtttcatgtaagatgtgagccagagactggctgcgtgttactccatcatgccgtagcaccagtcccactgtgctggcattgttggtgatgcatctctttccccataaaatggtgagttccggccaggtgcggtggctcacacctgtaatctcagcactttaggaggccgaagtgggcagatcacctgaggtcaggagtttgagaccagcatggccaacatgttgaaataccatctttacaaaaacacaaaaaattagctgggcatggtggtgcgcacctgtagtcccagctacatgggagactgaggcaagagaatcgcttgaacctgggagtcagaggttgcaagtgagctgagatcgcgccactgcactccagcctgggtgacagagtgagaccatgtctaaaaaaaaaaaaggctgggactgggacttactacttctgattcccagtacctgacaaggtgcctggctggctcatggtgctcagtactgattgttgaatggttcatatgagaagatgcggtagcactgtgtcccagcatcttggtccacctccagttgtgattgcctttctctctttagcaaaagcgaaagcttcggatctacatttccaatacgttcagtcccagcaaggcggaaggcgatagtgcaggaactgcagggacccctgggggaaccccagcaggggacaaggtggcttcctgggaactccgagtggaaggaaaactgctggatgatgtgagttggggagggaggttctggagggaaggaggcctgtgtgggtttaagactgagaccaaggagtttgatactagcctgagcagcagagccagaccccatctctacaaaaaatttaaaaattagctgggtgcggtggcatgcacctgtagtcccagctactcataaggctgatgcaggaggatggcttgagcccaggaggtcgagcttcagtgagttatgatcacaccactgcacttcagcctgggtgacagagtgagattgtgtctcagaaaaaaaaagactgggccagacacttgggcgctcccagagaagtcctgccatagggaggggggcgctgctccaagcccgttggaggttgatttgtgtggttattacagtgttcctgcagatggcagtcgagtgtctcgaggaagtccctcgtgggctgcaagagggcaccatttccctgcctccagtctgcccagagtcctgcttccatccttcagggcccaggaatcttcagtatccggagctccagggctgaaatggggcttctctttcttgggatttagcatagcttgagatttgagagctcagcagcaccatctcacacccctttccatccccagcctagcaaacagaagaggaagttttcttcattctttaagagcctcgtcattgagctggacaaggagctgtacgggcctgacaatcacctggtggaggtgagagtgggcctggggcaaaagcaggctgatgtgcaggtttggcagggaaatggcctcagggcccttgggaggccctgtgttcacgcccacccccttggtgataagccatgcttccctccctgccagtggcaccggatgcccaccacccaggagacagatggcttccaagtaaaacggcctggagacctcaacgtcaagtgcaccctcctgctcatgctggatcatcaggtgacagagaccctggggtcatttctgggcccacagggacccctcaggaggggagctggttcctagaaacccttcctgtccctgccctattttcccactgttctactataagaacccgttctgactcccctccatccaactccagcctccccagtacaaattggacccccgattggcaaggctgctgggagtgcacacgcagacgagggccgccatcatgcaggccctgtggctttacatcaagcacaaccagctgcaggatgggcacgagcgggagtacatcaactgcaaccgttacttccgccaggttagccagatgccagcccccgttttctcagcccttgctttgccttgcctgctgggctactccttggccacagcctgcagactgctgccctcactggtcctggaatggtccactccactgtgcccacaagccaacgctgagcctttcgtatttcctccagatcttcagttgtggccgactccgtttctccgagattcccatgaagctggcagggttgctgcagcatccagaccccattgtcatcaaccatgtcattaggtaaatgcaaggagggggacaggaaggctcttctaagagcagattcacccttggcttgaactaaagccaaagaaagcatcaggtttctttttccctgagtgtgtgcagagaatgggccccagatttggcccaggtgggcaggatgaagtcagctatgtgccttccctccccatgtgctgcctgcagtgtcgaccctaacgaccagaagaagacagcctgttacgacatcgatgtggaggtggacgacccactgaaggcccaaatgagcaattttctggcctctaccaccaatcagcaggagatcgcctcccttgatgtcaaggtgggccctctggctccacagcttcctctggggcccaggattggggtgggctggctctgtccagcatttccatacatgtagcacctggaggacgggatgggaactctggctcagttgcttgcatgtaagctttgggggcacagtctgacacaggtaccctctccagatccatgagaccattgagtccatcaaccagctgaagacccagagagatttcatgctcagttttagcaccgacccccaggacttcatccaggaatggctccgttcccagcgccgagacctcaaggtgtagtcctctttcccgaggggactcctatgtaaagctctgggtgatttttacccacagcagttcccagggtggattagcccaggggtggggattatgctatggctttcctcctggctctttgcagatcatcactgatgtgattggaaatcctgaggaggagagacgagctgctttctaccaccagccctgggcccaggaagcagtaggcaggcacatctttgccaaggtgaggctctgccctgttttccctcctttggccgtgagtagcaaaggcctgagccacttggtttctcccttctccaggtgcagcagcgaaggcaggaactggaacaggtgctgggaattcgcctgacctaactgctcagggatctttcttcccagccctggagcctggagggagaccaccctctgggtccttgctggggccgcagacacgtaggctggggtgaggagtgtctgctgtcaccctctactctccagctttagtcttataaatgtagtgataggattccttgttgcttggtccccaaagccttatactttttgcattggctttaattgggttcagcagatgcctcctctgcccccctgcaggcaggcccaagtaggactgctggaggctgtgctttgacattgtaagacatttccgaaccaaaggctgctgggtttgcatgtttacagactccccctggggcgagggtcagagctggctctggggagctgggctaggaagaggaggtgcagcccagactcttcctagcctttctaaaccaaagttctttgccattcctacaagcccagccttgctgctggttttttcctttcctttgggtatttgcactattttgggagcaagttttctatgtgggagccactttttttgtacaggggtaagttgggggttttcagggagcctgttaggtgcctccttcttttctttcctcaatctatgcaagcggctctggccgccatcatctcctgggatgccagagggctgcctctccagcggcttgggccggggaggggacactccagttctctagcatggcctgaggtatggggtatgtgcatgtggaggccagggtaaggtgaatggggaggctgggaggactggtgttgccctttggagcttggtgaggagggtgggcctagggcttggcgagtgccacatctggcaggtttggaaatttccaaataaatccttttgtctattggtggtgcctggacctggtccttgaacagcacagccctcattaacagactggagtcctagaggacttggcccacagagctttattggagagatacacacaaaggctgtccactcacttccataatttcttgatggacatgtttttctcactgtccttctgcatgacctaggggtgggagagagaatgaacattaagttacgaacacacacatgccctagcccactgccccagagccaccactggcaaaggcacaaagatggaggcctataccttggctactgccatctcaaagtcctcctgagtgacatggactcgccgttctcgcagggcatacatgccagcttctgtgcacacgccctgaacaggaaaaggaaattgaggccccactgctgtgcccctcatctgtggcccttgagcccagagcttcctgcctctgccctgttttcagtgggtactccaattaccttcacttcagcccctgatgctcctggcatgagctcagcaatttttctcaggttgatcccccgggtcaggttcatcttccgagaatgaatcttcaaaatgtccagccgggcctggagatggcaaggaaaagcctgagccccacaccccacccccacagccagagccactttgcacagtgtccatcacaaacctcctcattggggggtgggaattcaatttttctgtcaatgcgccctgggcgaagcagtgccgagtccaggatatcaatcctattagtagccatgataacctgagcagagaaagcaagtggggatcagctaaacctcttcctcagcctgcgtggcacccaggccttccctgggcccatcccaaggatgctaccaccttaccttgatgttcttggtggcctcaaagccgtcgagctggttgagcaactccagcatcgtgcgctgcacttcactgtcccctccagaacccccctccagccgcgaggagccgatggagtcgatttcgtccatgaagatgatagatggagcatgttcccgtgccatgacaaacagctccctcaccattcttgcccctgtgtggaggccgagctggtgttagggagcttattagcttattagctctctaaccccctacccctacctcttgcttctcacattgctagccatggttaccttcccctatgaatttctgtaccagttcagagccagagacacgaataaaggtacagtccgtatgatgagccacagcccgggccaacagtgtcttcccagtgcctggaggtccatacagcagcactccctacaggggaacagcaggactcagggcagaaagctacacccctcatttcattcagtgaacatttaccgagtgctgggtcccttgctagatgttagggatacaaaaaaaaaaaaggaacatcaaggtcccttctatccaaaccacctcaccgccctaggaacacttccccagccactcttttcagggggagggccagcccaagcaagatgcagcctatcccggtgcctccccaacccctgcagtagggctggctggggcaggaggagtaagtacagcttggccctctcagagaagccctgctcctcaccttgggctgagcaatgcccagtgcttcgaagagctcaggatgcttaacaggcagctcgatcacttctttgatctccttgatctgtttgtccagtccaccaatcatctcataagttgaatctggtactttctccaccatcatcagtgacactaatgggtctaccttgttgggcaggatcttgtgcagagtgtagctgtcattccttagagccacccggcaattgggtgtcacctgggtgaagggggcgagtttcagaagtggtacagtaagagctgaccccaccaccaccaccacctcacctgctacactcacatcattgatgtcaatgtttttgtccacgtctacaacaaatttaccttcaggatgtacctaaagaaacaagggctcatgaccttccttgacagccaccaaatcactaatcctacccaggaagacctatgagaatcccacaataccttgacagaacacagaaccctgtctcccgaggctacacacaaaggggtgggaatgcagtggagaccgagctggtccctggggtcatgctgcttttaccttgaccaacactttcttcttatccatggcccggactacttcccccacataggagccctgctcctgcagcagctgtagctcctcccgcaataggcgaactagatggcaaacagacacagtggtcacctagctactcctttggagtctccaggacccaattctacgtgcatgagctaagcatcactcttattaaaggaaggccaaaggtcaaaattcatgtatttaaggaggctacaatagggctcaggaaaaagagatgcatgtgaaactactagatgatgacagggagaaaacagtaagcactgctgtgaagacacagtgcagggagataaggacagacctcagacaaactgcccacatgcggcttcccatctttctccactcacctttagcatttagttcgttcctctgtgcctgcagcctccggaggttttggctcttatcattcacaatcagctgtggcagacaagagacaaattccattattcaagggcaggagacaggaggaggtaggatcttggccaagacctcacaggtctgaatgagctgagggaagggcacagggcacctgcatgttgtttcagattctccagtatgatcctaatgaccctgccctgtccttcaagagtccctctggaccttacagcagccatcaaagaaggctgcttgtccaatactggtccaggagtaacagaatctaatggagaaaagttacagctggctcatgtaacaccaaatttcttgcaggaaggcaacaacacctggtggaaagattgttaggtgagaaacctgagttctagcccagccgctgtcaatcaaaagcaaagtaaaggtaagacaatctatttttaaaaatctagatctgttaccaaacggcacatgggtatagcatcagctaccctgcttcaagactactaaggtgaacgaataaaaacacatgaaaaagcattcaaaaatggtaaactaaacataatacctgcaaatgcacttggaattcagaattgtcttttgtggctttcccccatccaatttatattacagttgacacttgaacaacgcagggggttagggtgaaattgaaaatccatggacctgtccaaagttaaactactaacagcctaccgtaacagtataacgtaacactaacagactactgtttatgttgtctgtaaggcttactactggaagccataccttactgctggaagccttactggtaacacaaacatttgattaacaacataaacggtcctttttctatggtttagcgctttaggctagggctctgggttgcccaatttctttcattcagtctctatggaattagcattgtccagatccctcaatgatgcccttcctcacattctcacttcaccctcacccaacctcttggtgataaatttcaactcctgagcttatgtttcccttttataagaatccttttcattcgggcttcttccaaaagggttgacctttggctagaggtacctttactattaagatttgactcgaagatgtgtaacaaactgtgaacactaagaccctcaaagagatgggactggaggagaacaagagattgcttacttctgatacatacaccctactagctaagaaacaaacaagaaaggagaagcagcagcttcttccactgcactcccaaaggaattagatggatttgtggaagtccgtttccatcccccatcatcacccttcctagctccctctggagtccgtcctcacctggagttcttcaatcttggacagataatattggcggagtccgctgcctgccttcccctcctccagctccatctgaagacacagagtgagtcttaaacgacaggttaaacatccgagggggtaaagccacttgcagggcactttgaataaggcttgacaccaggtagctttgcgtagtagaaaaagtttggacttcggaggctcaggatctgggttctaatccctccctcccttggaaccctccattttcccaggactaaaataaaagaatgggaacgccgcctacctcatacgacttttaggaggaccgagaggcgatatgatatagacggggggcgctttgcactgcgtgaagtgctctacaagcccgaggtgtcagtactgacgaaggagccagcggaacggagccaaaggactggcgtcccgtctcctgcgacccgtgggccggccattcccgcgcccatcgcttccctcactcactccgcttctaccgcgtcttcctctcccagccttgccctgactcaccgagggcggcgctgacacagcagatccggtcgcaggcagcgtccagcatggactggtccaggcacctccgacccacccgacgctcctgccccggcccgctctccactcagatcacgctcgctccgcacccagccccgtaacctgccgggccgccactgcacccgccatacctgctctggtccgtcaagcgccatcttctctcttcagcagagaccgccggcatccgagccgtcttggcgcgcaagcgc

SEQ ID NO: 248 - DNA, 1044 bp, Homo sapiens
ctgccgtgtgcacggccgtctggtctctctcccacacgtgtgcgcaacctgtcatggagatgtgagggccttgtgtgtgcttccgtgtgtgactgtgtgactgcgggtccagacccccgcctggcggtgatgtgggcccttaaatcactcttcctgctcaccccctccccagtgattcggttttactttgcagcactgtggatccgggcagctgggcggcttctcgggggtgggggatcccccaccccgcccacaagtctggccccagggttctcggaggcagggggtctctgttagtgcgctccctccagctgcaggcacatagcccgagctcacagctggcctgagtcgacgccggctggggtgaaagctccaagtgggcctctggccttcccgctgctctgggtccagagtgtctggagcatgtggcacagaccagggcccctcgtcctccgaggagggtgggacatcctctctgtctcacgcccctgggtggagattctggctggcctcctctccctgtttgccaaggtcaaagtgggccaagggtgcaggtgcttagcctggttccctctcccgggccccgaggttctgtgggtcgggcagattggagacaggactcgtgtaagggctctgctggggtgaaggatggagacagagaaaatcaagatcctttcacaagttaattctacgtctgctgagccccagcccccgacacatcaccctgaggaggtgctaggcttctctgggccccctgtgccccatccacatgttgcagagtaaatctggccccttggacctggggtccgagatggacgcctggctgcccctcctggactgcgggtgacagctggcgagacactgcggggcttgggtgcggggagatggagtggggctgagctgcatttttccagccaccccacatcccacagaaggggagtcatggtcagtgccttgagctggaaagacgggcaatgcttccggcccacaccaaccaagaaaaccaccaggggctcattcatcctctcaaagaggctaagaaaa

SEQ ID NO: 249 - DNA, 207 bp, Homo sapiens
ggttcaagtgattctcctccctcaacctcccgagtacctgggattacaggcacctgccaccacacccggctaatttttgtatttttagtagagacggggtttcaccatgttggtcaggctggtctcgaactcctgacctcaggtgatccacccgcctcggcctcccaaagtgctgggattacaggtgtgagccactgtgcctggcca

SEQ ID NO: 250 - DNA, 1066 bp, Homo sapiens
tttctggacacgtggcctgtagcagcctggcatctgtggcgcctcgtgtggctgctggcatcggtgaggcatgagctatgagtgtgccagcctcgggcccttggttttgtctgcctctggcatgtttgcattggtggtggagctgacctttgccccttagagagtctcctgtggccttcaacggggaatgggggccagatgatagcgcgggccttgtgctgcgggaaaggctacttcctcagtcagaggtcatctggagggttctcccctgcggttggaagtgttcatgcaaattccagatctgtcctggcccagcttggaggtgggccttcctgactgggccatcccttgcgagcgttctcagcccacactggctccctctgcgcaggcccctacttgtgaaggagctgagccgcactcggtgggctgtcctggggcacccatgttgtgtgttttggttttgtttattttgtatctgcctggtttttccaagtctaatcaggatgtcccctggggtgacattctttgctgagagaagggcacatgcctcggttccctgggctgtagaaagccagtgctcagccttgctttctgccgcagacttggtgcccggagactcgctatcaaagtgcagtggagataatgtccaatgggaggctgaggcaggagaatggcatgaggcagagcttgcagtgagccaagatcgcaccaccgtactccagcctgggcaacagagcgaggctctgtctcaaaaaaaagaaaaaaggaaaaaaatggttatctgcatcctggttaaaatcagtaccaccacgtcccacacgtggtaacatggacttgctggataggacctccttgctccatgggcctggaagcagctgcttcagaaggaaggtggtgcggccggcggcagcggagggcgcgctgtgcagtgacgagatggtgcaggcccgtccacagccctggcccagagaaggagagacctcactgacccctgctgggcctgcctctggccatcttcattttgaaattcggtatcattgtctccagagggaatgagcagctcttt

SEQ ID NO: 251 - DNA, 692 bp, Homo sapiens
ataaaggtgaaagtagctctctagtagcctgtgacagggaggatcatcagacaggtgtttacttccttcctggattacttttccaggagacacccagatgtggcaatagctcttggggttttgggctgacgtacaggagctgaagctgtgatgtcgcgtgtccgtgtccttaggacagtgttaagtggggagctgcccccatcctgcattctcagcagatagcaggcatgtttgccagccggttggttaaacaagctctgaaaacataaacattgatggttttggtggtttcatgtgttgtcgtgtgacgtaagcagatgctaccacagcagagccagaggtgagcaagacgtagggcagagaatcccactcacagtaacacaggaactaaaacagctttttaaaatgtgtttgcaggccaggcatggcggctcaagcttataaccccagcactctgggaggccagggtgggaggatcacttgaggccagaaattcgagaccagcctgggcaacatagggagacctcaaatcaatgtttaatgacctgggtgtgggtggtgcacacctgcagtcctggctactcaagaggctgaggtgggaggatcccttcagcctggaagctcaaggctgcagtgattatgccaccacactccagcccacatgggtaacagagcaagaccctgtctctaaa

SEQ ID NO: 252 - DNA, 643 bp, Homo sapiens
tcacgagagggggcacagtcgtgcagcgggaggagcgagagtcggccactgtttgggtgccatgggtgtcctgggtagagttgagggcctcccccgggaaggataatgctgagccccaataggaaacactgccctgagctatctgatggccagccctctgtccatgggggagccatttcttttccttatctctaagctaatacccctctttcctgaggttctctcttactgcctaagctgtttggctctgggagttactggctagcttgtccccgtcgggatctcatccccatcggtatctctggcagggcttcttgaccagctcccccctggacctgcggctggagacggagttgtgccgctctctccgtcctagtttgccttttgaggcttacccactcctccacctgggctgttttaaaatgattagagcagaacctttcaatcaattctatcaaatgcatctgtagagctaagggggcggtcccttatgtgaaacctaatctttatagctaggccgatgggtgtgctcaccgccgaggcacgtcattacgatgctctttggctagtcattgtcattagaaatgtaaacactgattggggaccttcccgcaggagctgtctgggctgcctgctgtctcca

SEQ ID NO: 253 - DNA, 13191 bp, Homo sapiens
catttcattatctatctcttctgagcctgttgtatctggagcagagctgggcaggaggtggtaagcagaggctctggggcctcctagaccctttgcagagggaaccggagatgtcttccaagtccccaagtctggcaccacctcgtctcaatctcactttcccctccaggtctagcagacttggcctccatccacagggccttcttagcgcatgccctcttcgcacttactcccacttccctccccatccctcgatcctctgtccagaggtcccaagggcctgttcagaccctgaactctgcccagcagcccctcactctgtcctctaccagggcgccttccctggggctcctgctcatcctgcagtgcccctcccctcccaacccctgtgggggtgtcccatcactttccccagcacccacttcccacaggccttccctcctcccctgcctgctgacccggcagctcccgacagcacggccttgtttcccagggaacaatgcatctgtgtcacggacaacaatgtcctttcatgtcaggcgcactggccccggtgcacgccgggacgtggcacaaagggtgctttgtgcagctcagggatgtgagttcctggctttgccatgttggtgctgccgacccggggcctctgtccttgggtcccagttatgcaacagtcagtcgaggctgtggggctggcccaggggctttatctgtctccctctccaacttttgccaagttacccttctgggcttccgccagccaggagcccacactccctcagccctcccacacgctcctctcacctcctagctgggcttcgctgacttgaacctggccgagtttgcgggctcgggctccacggtgcgctgctgcctgctcgagggatatgacacgaagaacactcgccaggacaactccatccttaaggtaccagggatcctgccacctctgccaccctgaccacgggatggggacaaaccaggctgctcatcagaatcctctggaggagggttgttaaaaatacaggccttacctgaataggtagacatcgggaaggggcgagccctggaatcaggaaaccactatcagagggaggcctggctccgctgttggcctcagtttccccatcaagttcagagagggggccctgacagtctccagggtttggcaagcacctgcagtgggttcacgtcatgctgattgcatgccctctcttctcttgtggtcccctgacagcagccccacgagctgtggtatctttgattagtcccagcttcaaatgggagggagttaaggcacagacgttaagtcatttgcctgaagtcacagacagagctggcacctgaccaccagccagttgacttcttggcccagctcctaactcttccccaagtgacacgtggtagcctggcccccagtggattatcagtgaaaatgatggctgctgagggccccgggggcaggtttccagtggacagggcagccccacccccaggcagctgcctcgttggccttttgggaacagaaatgtctgggtgtccgtcaccagcacacctctcttcctctgtttccacacctttcacctggccgggaaaacaggctgtcctaacagcgcctctgcaaggggacccagggagagcctatggtatctggagcagagctgggcaggaggtggtgagcaggggctctggggcctcctagaccctttgcagagggaaccggagatgccagaaagggtccaggctgattgtcttgggagctggagcctttcagcctcagtcaggctgaaaagcacaggcacagtagccctgtgcacctcaggccagatcaagggagcctgggggccaggtagccttgggttcaagggaagctcccccacatcctgtctgcaaggtcttgggagtcacttcccctctctgagtcttggttccctcatcaacagccttgggctagctaggatgctttcatggccgagtgaataagccatagaaagcctcaacctagtggtcaccctttctttttttttttttttttttttgagacagagtctcgctgtcacccaggctggagtgcagtggcacaatctcagctcactgcaagctccacctcccaggttcatgccattctcttgcctcagcctcccgagtagctgggactacaggtgcccgccaccacgcccggctaatttttgtatttttagtagagatggggtttcaccgtgttagccaggatggtctcgagcccctgacctcgtgatctgcccgccttggcctcccaaagtgctgggattacaggcgtgagccacggcacccggccgaaagcctcaacggagtggtcaccctttcataagtggtgacgtcaggatctgtgctcctcttttccacttgctcatctctgcctgtcactccatctcagcctagattttagggcccaaatcttgccacatttgggctgttgttagtttgcaatggcttcatgctttttcatcagactttcaccaaaccctgcccaccacctgctgtgccaggccccatgagccctcttccctctcctgcctgctgggttgagctctgtggtccttacacagggccggggtgagtgtgtggcttcaccatggagaagctcattgtctaggcctgtagctgatggcagtccgctcactctgccaggcgcagggctgagcccaggcctcaccttgctatgccctcccctctggtctgccaggcaggccttggttccatctctgtcctccacacagggaaactgggctcagagaggttagtggctttgccagagcccccaagccaggagggggcagagagacaggattggaatccaagcccttctgaggccagagccgaaaggctgcagggggccctgcgcctgggcaggctgtgggtggtcagggcatagctgattgctcccctcgccacaggtcaccattggtatgttcctgctctctggagatccctgcttcaagacgtgagtgctggcacaggcctagggagcggatgggagcccagtcccgggcactaggggtggaggaacagggactctgggtgtcctctgttttcatctggtcctgaagcagggcaccctagtcacacctgtctgtcttcccaaggccaccatcgactgccaagtccatctccatcccaggccaggattcctccctgcagctgacgtgtaagggtggtgggaccagcagtgggggcagcagcaccaactccctgactgggtcccggccccccaaggctcggcccactattctcagctcaggtacagttcctcatctgtccgcccctcccctgctagcggcccgaggggtttacctccatgtcatgcccaggtccccagggagacgctgactgaggggagagtgatggtgggagggtgtttgcatgctcctgctgggctgatgagacctgatcaccttgtgcgtgctggctgtggtgctgggccctgagatcacagctgtgccttggactgagactgatgtggcctccccatcctcaaggccctgcagtctagcagaagaaacaggcctcaatcaagccatagataaatgcatgtctacctgcaaacaggataaaagctggggaagacaggcccagaaggtgggatccatctggggccagggaaggcttccctgaggatgtagtatctgagctgcattcagggggtgaggcacagtatacctggcagagggacgtgctgggagctcttgctctcccacatactctatgactttgactggccagtttgcgtctctctgtctcagtgttctttggaaaatgggattggtaatagcaattacatcccaggtcactttggggattaactgtccacatgtgggcacctgcccagcacatggtaagcacttagtgggcactctgttttttgtttatgtttttttagacagagtcttgctctgtcgctaggctggagtgcagtggcgcaatctcacctcactgcaacctctgcctcccaggttcaagcatttctcctgcctcagcctcccgagtagctgggactacaggcgagcgccaccatgcccagatataccttttttttttttttttttttgtatttttagtagagactggatttcaccatatcagccaggatggttgccaggatggtctcagtctcctgacctcgtgatctgtctgccttggcttcccaaagtgctgggattacaggcgtgagccaccgcgcccggctgggcactctgtttttattaaattatcactggtactaatgttatgaaaaatgtgaacgagccccaacccccagaggagatggtgtggcaattaggaggagggggtgttgccaggacaggaggctctggcctgcccccaagtgtttgctgggccccctcaaccctaagcagggcccccagaggtatgagccttggactgcctccaggctgattagtgaacaaggtgtcacgtgacaaccctgatttgtcccacagaatcagttagagcacaggcctcatgtggcccagcagatgcttgccgagtgattctgcctctgggaactgagagcagtgagagaccctctgacctcaagggcccagcttccctccactcccttttccactgcagacccagctagctgaggcccagaacagaaagctgggggcttcccagcacaattactctctccagcccctggatggggttccccagaagagagatgtgtctggggactaggccaccccagcgcaggtggtgccttcgtgtgaagtagaagaggcccctcccccaggcagggtgagacttgagtgcccacttgcctctggagctggcctccccccatatgcagagaacctgttggggacttgaaaagccacatagttatggatgggcacacaggccagcctggggtgtcacaggccagcctggggtgtgttgggcgggaaggcaggtggatactcagagccctgggtaggtcccacctagtcccttttgcctcctgctggggagtgccaggaaagtctgttttgaagttgggcttatgggtgacttgggacaggactgtgggcctgtccctttgggccagaccgctcgccctcaccatgtcccttccactccaactccgctgacccaggccccttccagcctcggggcctctgccgatgctgttctctgtgcctggaaagcccttgccctcttgaggccttagctggctccctccagcaatgtgtcctggaggtctgccattaaggccgtctccttggagaagcctcccctgtccccagactgggccagacccccagtaagcactgctccctgctgtgcacctctcactgcggttgtgggtagtggaggcagtttttgttcagcgttcttcttcctcgctgacctgtggtgggcaccccacccaagtgtgccctctgtggaatgaagggacctgggttcggagggtgacctatggctcaggctggttgctgctcctctgaacctgtttttcagtctgttaaatggcgccctgccatgggaggctctgtgagggcacgttgtgaagggcgacagtgagcagcactgggtgacccctgtcacctcaccccctgccccttcctgccttccagggctgccagaggaacccgaccagaacctgtccagccctgaggaggtgttccactctggccactcccgcaactccagctatgccagccagcagtccaagatctccggtgagtggctgcctggccctgcccccgtggcctcctccttcctcgggatcccccattgtgatgctcccctgcgtcgcccctgacaggctacagcacagagcactcgcgctcctccagcctctcagacctgacgcaccgccgcaacacgtccaccagcagcagcgcctctgggggccttggcatgaccgtggagggccctgagggcagtgagcgggagcaccggcccccggagaagccgccgcggccaccccggcccctgcatctgtccgatcgctctttcaggtgaggcctactgcttggtgccccctggagaacagacctctcccggtggtgccttgaacctccgcttctttacctataacacagggaccgtaaggtccccacctcagagggttgggtggtgacgattccactagctgatggccctgaagggtgcagccatgcccggcgtgcagcaggttctgttcatggctgctcttgcggttttgtggatcagacaagagcacgatctgctaggtggccttaggaagctgacttacctgctcattgcctggcatcctcgtctataaaatcggctcatgatggcagctgcaccctattgtgcatgtgaggtttcagtgaagtacagcacggagcgcacagggacattctgagcgccgctgcggctgactggcattattgtcgtcgttctgtgcttgtacctgttactgccctgaccgttgtgacttgtccccccacgacctgacccaggcggaagaaggactcggtggagagccacccgacctgggtggacgacacgcggatcgatgcggatgccatcgtggagaagatcgtgcagagccaggatttcacagatggcagcaacaccgagggtgagccgtgctgggctggtgggggcgaggccacctgctccaagggctggccctgccgcgctcagcctccatcctctcctgtgtccccacagacagcaacctccggctgttcgtgagccgcgatggctctgccacgctgagcggcatccagcttgccaccaggtagggcaggcttagggaggggtcgtcggggcggctggggcttgggggtgagagcagagtccccacagtccactcacctggccttgaacgccaaatcttgtcgccacagtgtgaccctgggcctgtcatgtctctgaacctccctttccccatctgtcaggctgtgtggacaccaccacctcacctgggagcctggggcagtgagggcacggacaggttcggtggtttcccacagttcacaaggtcacctccagcaatgcctggtgcagggctcagcacatggcaggggcctcacacgcatttatttagaaccctcccttctacttcctcccagctccagggactcgggaagaatggtggtggtgatgcctcatgggtttactgaacaaatctttccctagcaccagctaggcactaggccctaagtgaaggcctggttcaatgcaggctgctgcctacacagcatccacagatggcaggggtagatgggaccaaagttgcgggaacgacagtttatagagtgctgcgtcacagacattcatttggagcatgttgactatgtgcctggctctccatgtgctttggctaaccaaatgaatgagcgagtgagcgaatgagcttcccacaggcgggctgctgagggcaggtggggagcccgcctaacatccacatccccagggaagaggcgtggccaggccgctgcgcagaggctaccctctcaagctgctctgctgactcctgctggccacggcctggaatggcagctatcacctcccagtagcctcctgggctgctctcgggtgggggtgagggggcggtgagcaagaaggaaactgaggggctggcttccttatgggtttgtaaacacacccctccctggccccctctgaaaatgaggaagcatcttggggaaagaaaccaatctggttgggagcgagatcacagcagagctacatgctgagccccgagagtccccgactccagggctgggcctgggctcggcagggaaaggagctgaccaggtttcctgacttcccactgccctcttggtcaccctcacatccctctgagcctcagtttcttcacctgtcaagtggggcaggatgcagtgactccctgccgaggtgaccgtgaggatggggtggcacagccagatgtgcccggaagggctctgcaggccccacagactctgatgcttactatctgtgtcactgtgggcaagggacttaccatcgctggggcacggttttagcccctttgcaacacagggctggttaacagtacctgcttgtgaaacacctccagaggcctggtccagtggagcgctcaggaaatggggtatcgagggggacatgctgacctgtctctcacctgcagggtctcttctggggtctacgagccagttgtgattgaaagccattgaggagcaggtgtccgggctggagaagagtcctgctttctctggagtccagacctgtatcattccatgaggaactttccccttcagatcacctctgcgccacatctcatccatgcctcctccatgcactccagtccacactccccgtagcatcattccattgcccctcccatccatgctgggaccctcctggcccaccaaggcccaggcaccactgtgaatattctcctctgaaccactagagggcaggccaggcaggccaggcgggcccgtgcagcttgtgggcaagaaggagctggcaaggaccggcgctgctggagactgacccagccctctggctgaggacatgcagcggctcctaaatgtagagatgcctgtggctgagggggcctctctacctgtgtccccactcactccaggagcactggctttggtcacgtcttagcagcagggccttgctccgttgttcccttgccctggtggtgggggggccagaccacctccggaatcctgccacctgtgactgtctgactgcttagtgcttcagctgtcccttccttgtgtcctgggggacctgctggcggcctcttcctgggagccatgacctcagaccccacccacactccagatcgagacccctgcctccccccggcaaatgtcctcccgctgccttgcagcctgcactttgcacatgctcacccccagcacagtcccactggcccctcacctccccttccctgagctccttcccaaggactcctggtcactgcctgctgtgcagtcagaggcccagggtccagcagcccggcgggaacgggtgctgcctcttcctccagttagctccagctcaggtctgagacccgtgctgagaaaggtctgagcaccgaccgtgccctctgcccagggctgggtcctgagcagctggttttcctgcaggaaggttggagcaagcaaagtccttctctgccctcagggtcagctgcccagactggggcggatgccagagaggcaggtgggctgtggctggactggtccggagctggcttccttaccagaaaagcctcagccttcctctggaagcatcccccgttctgggcaagggggaagggctcctttaaggggtgtgctttcccagtggggagcagtctggccctgccccctactaaagcctctgctctcagcactttcccccaagtccttgtaacttgcttgaaggtgggttctggctgccagccagtccctggacaaactctcctgccccttttaaatttcactcattttgtataaacccagcaggctggtgtttacttagccctgtagcttttttcattttttctttccgtctttcttcttgagttcacggttcaatattgcctcctcgccctggtgaggggaggtgctgcttttctgccccacctgccggctggttccagcagcgctggggcccagctggggggccgggatgggggcttctctctctgggaggggtgcaggtgccctccccaggctgggagggttccttccctagctccccatctgcccccgctggtgagagttgggcttcttggtcttggaactccctggcattgggaacagagcatttccagcatttgttgttgttttactcacctaacccttagaaaatgaatgttagaaggtgcctgccgaggcgggacagagtgttcgctcgcgctggagaaggctctgctcagccctgagagtcccttcctgccccaccgatactggcactttaaaaaggaagctgaccgcacagtgtccagacgaattggcccccagaagatggggagttctgtcctgcccttctgtgtctgcgtgacctcacccagcctaggagggaggtgcattcagggtagatttgcctctcattcaaagttctggggctttgggtggaaaacagccagctttggcgctgttggggagactcctccagaccaggaaccccagaaggagacagagcctgccacatcctcccacgccaggccctgggccagggtgattggactgagaatttggccacaaccaaattgatgctggctggaaccagaggccagaaagcctggccttgtccccatgtgggagccctgtcctcagccctcttgtccccttgagctcagtgaattcccaccaggtgcccacagctcctggacttcaaattctatatattgagagagttggagagtatatcagagatatttttggaaaggagttggtctatgcaatgtcagtttggaatcttcttgaaagtttaatgtttttattaggagatttaaagaaaataaaggtctacaatatctttaggttttttttttttcctgtttaccgcacaaactgaccacatggcatgtctatcaggatggagggtgtccatgttctcctctgtctttagggaggtgataaggagatgggcggaggggtgtttttttctttgactcccctcctttctaacagaatgttgccaccactgcttgagtgggctgtgtttgttcctctgtcccagcttctgttgtagaaaataacattgttaggggaactcaggctagtgtcagcgtcttggtttggggagaaaaaattaaatgtttcggtttttgtttcttttgctgttttgtttttaccttgttactttatcatattgactttagggtcaaaggcaacatcagaagaagtcagatatgtatagtgacattccaggggtggggaaggtgtagggatccagggttctcccggtcttggccacaggcacaatcatcaccttcatcgttccagattcctggggagaaaactgagaagatcgttacctgccagcctcatacggagcaaaagctctgtcctcagggccaagttctaaccactgctctgtagaccttctctgcaatcaagtggcctctaaggagcatgcctgaggacaaataactgcgcctcagtttcctcacctgcagatggggttatcaaataacacgagtgtgcagcctgacctgtaggaggtgtgagtgtgttcccaaactaaagccccaggctgccatcatttacaggcttggcttgccccgggcccctcacccccgtttctgaccatcccaagtctctctgggacaggcaagtcactctggttctttaataagcttggaggtgttgggaagcttcagtggtactggccaggccaggaggaatcaggccaccagggctccatctctatcctgggatagcattcaccccactcctcctcagggctgaccccgactcatggcccctttaaaccctgaaggccgattctgccccttcctctgttatatgcacaactgaggaaggaggtaaaagtgggctcctaggtgagcccaaagtctcctgagagataagggaaaagaattggactgtaggtttaaaaaagttgctcttggccgggcacagtggctcacgcctataatcccagcactttgggaggctgaggcaggaggcagatcacctgaagtcaccctgaccaacatggagaaaccctatctctactaaaaatagaaaaattagctgggcgtggtggtgagtgcctgtaatcgcagctactcaggaggctgaggtaggagaatcgcttgaacccaggaggtggaggttgcaatgagccaaaatcgcgccattgcactccagcctgagtgacagagcgagactccgtctcaaaaaaaaaaaaaaaaaaaaaagttgctcttgtcagctttgggagggcagactccatagttggagatgggcttccaaccaaccaaggagataaatgccagagggagcgaaccatgccaggctcaaagcacatctctccccaaactccccaggtggggacagcaggccaaaggcctccacataacccctcagggaggcctggagtccagatgctgtactccagtatctaaacaatcactcaatcttaaagctgacaggttcaaagctcttactttgggccgagcgcagtggcttacgcctgtaatccaggcactttcggaggctgaggtgggtggatcacctgaggtcaggagtttgagaccaacctagccaacatggtgaaaacccatctctactaaaaatacaaaaattagctgggcgtgttgacacgtgcctgtaatcccagctactcggtaggctgaggcagaagaatcgcttgaacccaggaggcagaggttgcagtgagctgagatcatgccactgcactccagcctgggtgacagagtgagactcccgtcttgggaaaaaaaaaaaaaaacaaaaaaacctctttctttgggccaagcctccactgagtgccagggatacagcagcaacctcagaccctaccctcggggctgacagggctggatcaacaattgcatcagtgaattaaaaggcacaggaggctgggcaccgtggctcacgcctgtaaacttttggaggccgagttgggaggatcgcttgagcccaggagttcgacaccagcctggataacatagaactccgtctcaaaaacaaacaaacaaacaaaaaaaacgttcccgactggcttccctgaggaacgtggcgtcccagtgagaccggatgggtgaggagcagccggcctgtgagtggtgggggaccgcgttcctatctcggagctgaagaagcgtggaagatgatctggcccaacatctctttgttctcagaggaagggccttccaagaccggggaggggcctgtgcgtgggtcccggtccgaaacgtgtctgggctgctgcgagagacagtcggtgaaggaagggaggggacatccgaagggtggcccgggaggccgggcgatggtgaggagggcgcctcctctccaccaaatcctccccatccatgcgggctagggacagaccctcccccgcccaccctaggctggaaagtgaacgttctctgcacctctcccacctacagactaagtagggcacccggtttccgtgtcggcttcaccactgactcggaatgggatctacctttctctgagcctcacttttcccatctgaaaaatggaacttccgatcccgcac

SEQ ID NO: 254 - DNA, 1316 bp, Homo sapiens
cggaaccggatgtggcttgcggctcgggtggctgagcgcgcggggaaatggtgagattggcaccgtgtgccggagataggggcgtctgggggtggggtcccgggtctgctcaggagctggggcatgggcacttggaacggggattgctctcccgcccccactattgtacggacgacaacgcggaggcctagcattctctcccagcctagaaactgatccctagtcagccctctaccatctgttgaatgggaagcttagaccgtgatcgggccgcgacgccccgcttccattagtgcgccgaaatagagggtcacttcgtcagctgagacctcccttttctccaggccacggggacagaccaggtggtgggactcggcctcgtcgccgttagcctgatcatcttcacctactacaccgcctgggtgattctcttggtatgtcattctccccgtccgctgctcaccttccccgagccctggcaccgccagagcaactactatataggctctaggcacggcgctggcttcattgcctgcctcatctcttgaactctccagaacaactctatgaggaagatgccagtggtaccgcattttatagatgagatagctgaggctaggggagaaggatctggcccaagattgcatccttagccgctacacttataactctgtttccggcttgctttgacttttgggggagttctgttccttctgggttagcctgctgactcttaggcatggcaaacgccagtgatatttgtgaaggcctttaggatatttttttcttgtgggaaaacttgttggttattgcttaagaagtgcagtgtgtctggaagtgcagaacttggtatcctttagagaaaaaatattagtgaagaagccctggaggcccaggttgggagtcagtcgaggattcctcaagtaccatttgctaggctgtgaggtgccttagggcaggtctcttgtgccctgttctcttgtccccaccaccaacctatagcaggcaccaaagcaagtgcccggtaaataccaataagaaattaaggaaagaaacaaaccacgacacccaaatgccgtaatcttaaagaaaagcaaatgcagtcccagtcctctgaatgggtcagccccttagatggaggaggtgggacgtttgggcttgggggctcggcaaggcaagcaagacacaccagagctcttccctcgatgccagccattcatcgacagtcagcatgtcatccacaagtatttcctgccccgagcctatgctgtcgccatcccactggctgcaggcctcctgctgctcctgtttgtggg

SEQ ID NO: 255 - DNA, 309 bp, Homo sapiens
ttcttttcttttctttttttttttttttttgagatggagtctcgctgtcgcccaggctggagtgcagtggcgcgatctcggctcactacaagctccgcctcccgggttcacgccattctcctgcctcagcctcctgagtagctgggactacaggtgcccgccacctcgcccggctaattttttttgtatttttagtagagacggggtttcaccgtgttcgccaggatggtctcgatctcctgacctcgtgatccgcctgccttggcctcccaaagtgctgggattacaggcgtgccaccgcgcccggcc

SEQ ID NO: 256 - DNA, 755 bp, Homo sapiens
accatatacttaacatgtatccctacggtaacctagtgaggtgactctcactatcgccatcttacagataagaccactgaggcactggctccgggcttctcatccagttggcggcacagaggagtccaaggtcaggttgtctagagtccagctcttctcacgaccctagtccgcctccacagaaccagggacgccggacaaggaggacactgccttcaggacccttctgcggaggtccctcatggtgcagaagttgggagtagaggcagaaacagctgtgaaaattctgatttgtttgtttctctgagccaagctaaagtggataatgaagccaagctggcgattaccttcctgtgcgtgataatggtggtagtggtgatgctgactgcagcaggatgacggtgatgtcagcagcgacaccattggtcttattgatggtggcagtgcccagggtggtgtgggggtaatagcatgagtgggtgctgggatgctgttagtgatcctgctagggccaggttagcttggaggggagagtgatgtccatcactgcagtggtggcaatgctgctagagacctcctgagtagttggactcgggctggcattgctgctgggaccttccctcacccccatcaggaagacccctctgctcctccccaccctcagtgaagggggcagggctcagagccttccgtagaactggctttattgcattccctgttctggacagtgtaagcgatggccctgcctctcgaga

SEQ ID NO: 257 - DNA, 555 bp, Homo sapiens
aagggttttggcctgagccactggaaggctttactgagatggggaagactatgggagaggcagttttcacagaagatccagagttcaagtccgaacatgtcaaccagaggcacagcggagaatgtggcggtgcatcccaggcgttgggaggtcagcccactacctggccccgaatgcacgcagctcccaagtctccccagctgggcaaagacactctgacttctcctcccatcctctcctgcccccttccctgttggaagttctccctccactctaactgaaattccctctctccttggaccagccccttctgctccccattgaatggccaagtgcccagatacagctgcatttaggaacagggaaggagaagaaaataaggaacccagaagattcctgcctgggtagagtggaaggcagtggggttgttttcctctcctggcaacttaagaagcttgtaccaaaaaataaatgtggagtgagagtaaccccaatctcacttgggtcagagtaatcaaaatgtaattgggtttgtgaataactaatgtttaccct

SEQ ID NO: 258 - DNA, 11003 bp, Homo sapiens
gctaggagacctgttctgatgatgtgtgtggtcctcaccacactgccctgcctcaccttttccatagcagtgactgaggtatggaatttttgatttcttctgctacaagattatgagattttataatttcttgttattggaatttgatagagcagcgtgctcaacaaatttcttgacatctatgtaatccaatcttcttccaggttgcaatatatgttatttaaagtactgagatcattgttacctctgtgattgtgaaggaaagtctagtagccaatttttaaaaattaattttgtgtttgtgtgtgagacagtaatgatatttgaacgtttaaaaagtgaaaaatgtgaaagttgatctatatttgtttcttctaccaacctgatgtttttcatgattgtcctcaattgtaaatgaatacaacaagatctaagggaaggaccacttacattttaatacctttgataagatgtccattgataataatttgcatgtgttatttatttgaaaataatactgagtttatgttttgactaaatatagcttcaaaagatcttggatagaaaccagcagggcaggaatatcttaggcagaactttcaggcttgtaagtacttcattatccaagaaggtcagagaagaatgccccactaatcttattgatttgcaaggtgctgtggaagataacttttattttcccaaagcatacttaatttactaaattacttaatttaccttgtgatatttcacttgtatgtgaagcaaatattcattaagtatatattacaggccaggcactgttaggtacagggcataggggacccaggaaatatggccgagtctctcatataattttctgacattagagagaaaaataaacaggcaattagaacaagtatcacaagtgttgtgagacagggcagtaccgagtaatgtatgacattagaaattacatggttgttagaatgcattgtaggtgctgctagaatacatcatagatgctaaattaggacaatgtatgaaggcatagaataattttgggaggttactcacatgtgctttgcttccagtgaactgcaacagggaatatttcaatctagatctgtcttttcccctctcaaagaccttgtaaatcatttggaaggttctcaaaagctgtaaaaatttagtttacaaccttttaagaaacatcactgcggtaaactgatggcatatctggagctcgatagccctttttggctcttttttatgatgtctcttccattgttacatctttttctttcctttcctttttttcttacttaattttcaccgaagtataacacataaacagaaaagtgcacgaaacatacaagtacagtaacaatggaataccacaaagcaaccccctgggtaagcatcgctcaagtcaaggtcaagaaggaaactttggccggctccatgcccacactcctttatttttatttattattttattttatttttgtatcagaaacccattgcttgctcactctttttttatgctcctttcaatgactccctttccctcctttccagaagtcacttctaacttgacttctgatactgcaggctagtttgtctgtttttgaaatttttccaaggagaaatcaaatgatgtctggcttcttttatttaaaatatggttgtgagggtcattcctgtttctgtaaatacctgaagctcattcgttttcagctgtagagtattacattttatgaaaagatcataatttacttatctgttctactcttggtcgccatcttggttgtttccagttttggcaattacagagaatgcggcagtgaacatctgtgaatatgtcttttggtgtgcatgagcaagcatttctgttggttatgtatgcaggagcagaactgatggatcatgagatattgaaatgttaaattgtgagagataaggtcaaacagcttttcaaacagattgtactgatttctatagcatctctatagaactcaccagcagagaaggagcattcaccagcgcttgcgttgtttcttatttttttggagacagagtctttctctgttgcccaggctggagtgcagtggtgcgtgtgatcttggctcactgcaagctccgcctcccaggttcaggcgattctcctgcctcaggctccccatcagctgggattacaggtgcccaccaccactatgggctaatttttgtatttttagtacagacggggtttcactgtgttggccaggctggtctcgaactcctgacctcaggtgatccacccgcctcggcctcccaaaatgctgagattacaggtgtgaggcacccctccaggcatcattgtgtctttttatttcagctcttctggtgggtacgatcctgaatctcactgtacttttaaattacatttctccagtaattaacaatgttgagcatcttttcatcttgcccattttttattgtgttgcttatcttttaaaaacgtatttggaagacttattttcatattcagattatacaagccttttttgattatatgtattgcaaatatctttatgtaacttgtcttcacacttttatatctttttgatgaaaagaagttcttaacttaaaaatagtccagtttattgctttcctttatggatagtgcttgggtcactcacttgtagaagattttgtcattgtgaatctgaatttcaaagtcttaaaatctttcatatatatatatttttgtttgtttgtttgtttgtttgtttgtttttgagatgaagtgttgccctattgcccaggctggactgcagtggtgcaatctctattcactgcaacctccaccttctgggttcaagtgattctcacctctcagcctcctaagtagctgggacgacaggcatgtgccaccacacccggctaatgtttgtatttttaatagagatggggtttcaacatgttggccaggctggtcttgaactcctgacctcaagtgatttacctgccttggacccctgaagtgctgggatttcaggtgtgagtcactgtgcccagcctcctaattatattttgaaagctatattgtttcttcattcttttttagattcacaatacatctggaactgatttttgtatatgttgtacagcagtgagttaatttttttccccacataacattcaatggaccgagcaccattttactaaaaaatccatccttcccacatttctctgctgtgccacctttgttataaatcaagtgtagatatacataattcctatgccaactctacactgtcttagttcttgcagctttatactagttctttatatccagaagagtaaatcttcctagcttattctttttcttccagaatttcctgcctttttaattttcatataaattttattgtcagcctgtccttttccacaaaaagttgcaacagtggttgaagttgcattgaatagtatcatttttccttccttcctccctccctccttccctacctcctttctctctctctctctctctctctctttctctcactctgttgcccaggccagtgcaatggcatgatctcagctcactgcgacctctgcctcctgggttcaagcaattctcctgcctcagtgtcctgagtagctgggaccactggcatgtgccaccatgcctggctaattttttttgtatttttagtaaagatggggtttcaccaagttggccaggctgatctcgaactcctgacctcaggtgatccacctgcctcgtcttcccaaagtgttgggattacaggtgtgaaccactgcaaccagcctacactgtttatttcattctctggcgcattaccctggctaagacctccaggacaatgttgaacagaagtggccatggtggcatctttgtcttattcctgatttcagagggaaaactttcaatatttcatcattaatacaatgctttccatagttttttgttattgtggtttgtttttgtttctgttttttgtggggcagggtcttgctctgtcacccaagctagagtgcagtgtcacagtcactagtcactgcagcctcgacctcctgggctcaagtgatcctcccatctcagcctctcgagtagctcgaaccaaagatgtgtgccaccacacccagctaatttttaaatttttcatagacttgggttctggccttgttgctcaggttggtctcgagctccaggctcaagcaatcctcccacctcagccccgcaaagtgctgggattataggtgtgagccaccacacctggccttgccgtagctttttgtaaacattttaagcagacgaaggaagtgtcccaaagtctagccagaattatctgagttctgtcttcttggaagactctaaatgttcatatttgttcttctagctctttgaggctggattcttagaagctctgctcagcagtagagttggaaggagttaccccttcaatattacagggagcccactactgttttttgcatgtatttaccaaggtctgtctttaactgaaaatatgcttccattgatatgagtccttatgacagctttagaaatgattcaaaaccttgtggcatttaaaacctgatgagttaaaaaccaaccttctagttttttagtaaatgtaattataattaatttagtgctgcattcagactattgaaagcattttgagcaaagaaagcacaataatttaatgcttgtaaatggttttctctaaacaggttcaaaagagcattaatgggtccgctgatgtcttacctgatatgttacctgacctgcccgtatctctggttctgttatccctgatcatggttgatattattgaaaaactcaggatatatcctcttagagggagtcaaaagagtaagtgttcttttaaatgtgaatattttttaaagtttgatatatttttcacatttctgccactgtgttatctgacaacatgtttaatgataccttttcttagggctaacattactgatagaagattgcaaatgaagatatctaaacataattatttttaaacctaccttgatagctagatagctgcttttgtttgctattcgcattttagtagtactgataaattaaaaattatcaaatagttaataccaaaaaccttaatgtttattccagcaagaaattatccaagtaaattattatagatgtatatttttctaggaagtctcttaaagcttatgtttaaatggattaataaaaagcttagtttggagacttttactacaggaattaatatgactgtggtagttgtgtcctagataatcatgtgtttttaattgtgaattataaaaatgccaaagatcacactaataaaaccaagatatggctgggtgcagtggctcacacctgtaatcccagcatttttggaggccaggatgggaagatggcatgagctcaggagtttgagaccagcctgagcaacatagcaagacaccatccctataaaaaaataaaatttaaagaaaactcaacaagatgtgtcacatctcctccaaagtgatgagttgaaactaaatacagattggcccttacaaaaagatattttgttaatggaatattttatttatttagtcgtaaattactccagctttcattaaatttcttgcggtagtatctgtgtttaattggcaatatttgtatgctagttactgtgtggctaagattttgtcatgttgtgcatttgaaatgggtaaggtttgtcaggttgttttctgatggggtgaatggagtcaactgagtgagcctcaggagacagcttcagagtgacggggtcaccactggggctcgtcagtcatttatgggtcagatatcagtaccttccagtcactcttgctgctcagatggaaagcaaaactgaggtggaggccactaggaagttggagaatctgagcctgtcactttgtacttcatcctcgggtgggagatgacggtctgttatggctaacataacacaggtgacatgtaggtggataagatggcagccggggccatctgttgagtggaaagcacacccaagtcacatctgccctccagagtcaagcgtatttgtcttaaactcaggagagttgggaatctccaaatcctttgctacatctctagattccttaaaaatgcaaatctatttttaaatataatttttttttcaatttgagctggggtcttgctatgttgcctaggctgacctagagttcttgagctcaggagatcctcctgcatcagcctcctgagtagctgggattctagctgtgcacggctgcacccagcgttaaattggatggtttctgatgactctgtattttccatattaatataaatttcctgtccaagttaaaaggtctttttaaaaaagaaagacacgtgtatctttttgggaataagttaataacattttatttttgttagtgatgagttgtttttttgttttgttttgttttgtttttgagacggagtcttgctctggaatgcagcggcatgacctctgctcgctgcaacctctgcctcctgggtttaagcaattctcctgcctcagcctcccgagtagctgggattgcaggcatgtgccaccatgcgtggctaatttttgtatttttagtagagacagggtttcatcatgttggccaggctggtctcgaactcctgacctcaggtgatccacccacctgggcctcccaaagtgctgggattacaggtgtgagccaccgtggctggccattagttgggtttttaaaggggaatttccttgcatccataacttcaataatgacactgagaattgaaataagacatctaaagaagaagtagatctgggggagaagactctagcacaatttgtacaactgcttctcacttgaagagcctccttcttgagctgttctccgtccaaatttaggaagattagtgtctggtttgatagttccaccgtttaataaattcacacttaaaaaaactagcagtcacttgaaatgcctttgtaaatatgaatcatacatgcttttaatttgtatgcaaagaccttgaacccaaattgtctcctacactcattttaacatgaaattaatgatataaattatgtaaattttgaatccatgaggttttctcatttattacttggaacatgaattaatatatgaatacattaacatgtaaatcttaaatacataaatctgaacctaagcaaatataccataaatatggtttcactacaggtgatacttgcaagtaaaaaaaattgactagaggcgggggatgaacaagatctagaataatttggctccctttaggaaatgtgggaaaagtgaatatgttctttgctctttccagatagtctgaaatgcatacatgtctgtcagctagcagcagtttggactttatgctagatgaaaccaacataatctacaacgttttgatttatggacactctcacagcatcctaaccatcttcattccaagctacaaaacttttatctttgtgtagcttttctttttccaaaattttaaataagttattctgctgacaaaatatgcttatgcttaaagcagtcttcaccggaccaaggaatcctttctactaacttcgtattaccagtggaaatctctcagtatcaagtaattatcatgcaacagcttctaagtgcatcgtttcatggaggtagagcagtgcatgggagcatttttctgacgcgtggatctctgtagcacggcagtctcacagatgtacgtggtacctaggaatgccaatccccagtcccgtgcagaaataacaagaatacaaaggatagcctgtgggtacaaatgagcgcaccttaatgcttccatttgaattttgctaactgaatcccatgtattaacgctcatttagcattgcaaccatacctgtttctaggacattaccatttttacggagagatagataggttgccagctctcactccaggcccagctccctggcaatcatgaccttgaaccacctagaagcaaagtgagcccccatctaaggtcttgtgattgctgctgctgctctgggcaatttcagctttgtaggcagagtgacccatcttggtggggtacacactggtttgaggctcaacagtaaagaagaggactttcatctcctcttcttcactgtcttttttctgctcccatttaattaattagttaattaattaattttttgagacagagtcttgatcctcctgcctcagcctcccaagtagctgggaatacaggagggcaccaccatgcctggctaatttttgtatttttagtagagatggggtttcaccctgttggccaggctggtcttgaactcctgacctcaagtgatctgcttgccacagcttcccaaagcactgggtttataggcatgagccaccgtgtccacctgctgctgctgttttaaaccagacccacagtgggtctcctgtgcccttatttgttggtccagacccctgactaccttgctgcatctgctttgcactcagcttttcactctcacgtgcaaacccctcagcatgctattttctaccactcctgctcggctctgctctaaatgctgttggtgctgctgttgcttgtgtctgggatattggtggatgttttgctggtgctttagactgacttcctttcttctgctagtgggaatattggcttcctgccaccgagttctagttttctaaagaggtttcaggcagagcactataataactgtttttttcttggaaacaacagccttttagcccttagagtgtatatgtaccaacaaattggctgggcttcagtgatttcaggtagtggccattctactcccctggaaaccaccatttcccctcccacttatagaactcgtggctgaatgtggcagagccagactcctttgaggcagcttttctccatgggggtctcatagatcctcaaatcaggcttagctatattgcctgaacctcaatccttgccatcgttagagtcctctccttgtcactacctagattccttaacccccatcaaaaccagtgggtgcaaacagacctatgaaagtgtccatgattagagagagagttttcagtcctaccttcaagactcatttgaataggacttgcagcccaggccagacatgctgttacaaagtgctacaatagattttaatagctaaagtactatggtgccacagatgaaggaaaacttcattttatctaaggtgatgaaggtaagagaagactaaagggaagatcttgggtttgcaggagtttgtaggtagacatggtaaagaaagctttctacatagaagaaaggttgggcctccaagaactaaggcgtgtatgtagcaaatggccatgtttgggaagtgaaaatgaagcagtgttgttgtctggggtagatacccaaggttcgtcatcttgtgccaagaagattaaggacatggacacacacaaggagtgagtttaggagcggaggtttaatagacaaaagaaagaaaggagagcagctctctctctttcgagacagaggggctcctaaatgggaattccagccatgacagagtgcaccgggttttatagacaggctttaggaggtggtgtctgatttacatagggctcagagattggttggactgggtgtgatgtttacatagcacccagaaaaggctggtcaccccaccgtaatcttattatgcaaatggactttccacttggctggtgccatgttgcctgctcctcactgtacatgcagctggcaaagagaagggaagatggagccaccattttgaccatgcctagtcccaggtggccttttcctattggcacagctgccagcattcacctgtacacgcttccagcttgcttgtctgtgtctgcagctcgattttacaggctgctgtttgttagaaaatgatttgggagtgcttttcattaaaaggaaaaccttaccaaggactcccgtaccctcatatctgcctaaataatttcttcttaactcctatatcaaaattaagcttggttggatttcacaccttgaatcaacaaacctggtgctgggaggcaagtttccttcttaaaactgactactgttcatcaaattgtcatttcagaaacctacaatgttacttcaagagtgactaaaaatttgcatgcagcccggcgtggtggctcacgcctgtaatcccagcactttgtggggctgaggttgggggtgggggggatcacctgaggtcaggagtttgagaccagcctggccaacatggtgaaaccccgtttctactaaaaatataaaaattggttggccgtggtggcatgcgcctgtaataccagctactggggaggctgaggcagaagaatcgcttgaacccaggaggcggagattgcagtgagctgagatggtaccactgcactccagcctgggtgatagaacatacctctgtctcaaaaaaaaaaaaaaaaaaaaaggaaagaaaatttgcatgcgtgtgtgtgttgtatgtgtgtgtttgggagaagggagagcttcatcatgatcaacaatatttttgtgtgtttaagagttgatgttttatgtgagatttcatttgggggaaaaaaaagcttcctctgctaaatgtttaaaaatcattaacctagggcttcattcagcattgtaaccgcacctgtttctaggacactaccatttctatgaagagatagataggttgccaactctctctccaggcccagctccctggcaatcatgactgcaccacctagaggcaaagtgagcccccatctaaggtcttgtgactactgctgctgctctgggcagtttcagctttgtaggcagagtgacccgtcttggtggggtacaaactggcttgaggctcaacacctttgaaaaacagataaaccttttaacatgccatgttgaattttttctttccaatgttgcatttttccaaaagaacacatactcattttaaaaagttataaaatagagataaacaaaaaagaaaagg

SEQ ID NO: 259 - DNA, 279 bp, Homo sapiens
gagacagagtctcgctctgtcgcccaggctggagtgcagtggcacagtcttggctcactgcaagctctgcctcccgggttcacgccgttctcctgcctcagcctcctgagtagctgggactacaggtgctcgccaccacgcccggctaatattttgtatttttagtagagacagggtttcaccatgttagccaggatggtctcgatctcctgacctcgtgatccacctgccttggcctcccaaaatgctgggattacaggcgtgagccaccgtgcccgg

SEQ ID NO: 260 - DNA, 1880 bp, Homo sapiens
aaaaaaaggcggtgggggaaattatctccacaaaacaaaaagtccggcaataagcaataagctgtccagggctgatacagggcatgatgaggtcatcacagatccaggttctttctgttttttgctctgcattcgtagcctgtggctttgtcattccctcatctggaaatggcggctgcagccccaggcacaatggcccgttgaggaagaagggggacgatgtgcagtgtcaggttattttatcaggaaagttcaaagcttctcagaaatcttctgttggaattctacctgggtgtcataggccagaacacaacccaaataaccaggaaaaatgtgaaagtgagaaaatagatcgtccacccctaacaatggaggcagcaagtgagaggggattgggaatgtgtgttgatttcctcaacagtgtttgacataaccactttctagctttataatcttaggcaagtaactcaacttcccagttcctcttctgtaaaatggggataacacctgaaaaggttgttacaagattcactgaaatagtttctatgctcagtcagtaatcagcattcaatcaatatgagctctaacatgatgcttgacagttatgcaacgaacagttcatgaagagctttgtaagccatattgataattttgtctttatccttagcacagtgagaaggtattaaaggattttatgcagggaagtgacatgatcatatttgtgttttcaaaagagccctcaggctgggtgtggtaacttgcgcctgtaatcccagcactctgggaggccatggcaggcggtgggcggatcgcttgagcccaggagttccggaccagcatgggcaacttggggaaaccccacctctaaaaaaaaaatgccaaaaaaattttagctgggtgtggtggcactcgcctgtagtcccagctgctcgggaggctgaggtgagagaatcacctgagcctgggagaggctgtagtcagctgtgattgcgccatgcactccagcctgggtgacacagtgagaccctgtctcaaaaaataaataaaaaataaaaaaaggagccctcaatttatcctctgcctctgacaaatatattccattttgttacattgcaaaaatttcagcacattgctttgcttacccatctttgctctggaacgacttttaattcttcttttggcaatcttggttgttttgagatgtgtgaaattagaatcatatgcaggtgtttgagttcttttgattttgctttttaaaagagttttttttttgttttgttttgttttgtttttagaatggggcaatgtaaagccagaatatcaacgtccttttgtcaagattttcaaacctatttggctgatagtgcacttacaagaataggtaaaaaagatcccaaagattttacttcacttacttgaactactagccctactattaagagccacatcaagctttacatgttcataaaaaaaaaaaaaaagagctgcaacattcctttcgcactcccactcgcccatgaggttcttccacttccttcctatggctttttttagaagcgagtgtgtttttctcacgtccggcaacaaaggatgttttgtgctactactgaggtttgtgtgtgtgacttactttagaactctttctagaaaatgcgattactatttgcataggtctggtagaactttgtattgagtgaaagtctccgatgactgtttttgtttttgtgtagatttgccactgcttaacatcaaatcactttcccctgtgtgttttaaaatacctctaataggacctgtcaaaattctcccagaagtctcacaaattcttacctttaaagaaagtgtaagtgataccttcagtgtattgtatttattcttat

SEQ ID NO: 261 - DNA, 1470 bp, Homo sapiens
aaaaaaaggcggtggggggaaattatctccacaaaacaaaaagtccgacaataagcaataagctgtccagggctgatacagggcatgatgaggtcatcacagatccaggttctttctgtcttctgctctgcattcgtagcctgtggctttgtcattccctcatctggaaatggcggctgcagccccaggcacaatggcccgttgaggaagaagggggacgatgtgcagtgtcaggttattttatcaggaaagttcaaagcttctcagaaatcttctgttggaattctacctgggtgtcataggccagaacacaacccaaataaccaggaaaaatgtgaaagtgagaaaatagatcgtccacccctaacaatggaggcagcaagtgagaggggattgggaatgtgtgttgatttcctcaacagtgtttgacataaccactttctagctttataatcttaggcaagtaactcaacttcccagttcctcttctgtaaaatggggataacacctgaaaaggttgttacaagattcactgaaatagtttctatgctcagtcagtaatcagcattcaatcaatatgagctctaacatgatgcttgacagttatgcaacgaacagttcatgaagagctttgtaagccatattgataattttgtctttatccttagcacagtgagaaggtattaaaggattttatgcagggaagtgacatgatcatatttgtgttttcaaaagagccctcaggctgggtgtggtaacttgcgcctgtaatcccagcactctgggaggccatggcaggcggtgggcggatcgcttgagcccaggagttccggaccagcatgggcaacttggggaaaccccacctctaaaaaaaaaatgccaaaaaaattttagctgggtgtggtggcactcgcctgtagtcccagctgctcgggaggctgaggtgagagaatcacctgagcctgggagaggctgtagtcagctgtgattgcgccatgcactccagcctgggtgacacagtgagaccctgtctcaaaaaataaattaaaaataaaaaaaggagccctccatttatcctctgcctctgacaaatatattccattttgttacattgcaaaaatttcagcacattgctttgcttacccatctttgctctggaacgacttttaattcttcttttggcaatcttggttgttttgagatgtgtgaaattagaatcatatgcaggtgtttgagttcttttgattttgctttttaaaagagttttttttttgtttggtttggtttgttttaagaatggggcaatgtaaagccagaatatcaacgtcctttggtcaagattttcaaacctattgggctgatagtacacttacaagaataggtaaaaaagatcccaaagattttacttcacttacttgaactactagccctactattaagagccacagcaagcttacatgttcaaaaaaa

SEQ ID NO: 262 - DNA, 3332 bp, Homo sapiens
aaaaaaaggcggtggggggaaattatctccacaaaacaaaaagtccgacaataagcaataagctgtccagggctgatacagggcatgatgaggtcatcacagatccaggttctttctgtcttctgctctgcattcgtagcctgtggctttgtcattccctcatctggaaatggcggctgcagccccaggcacaatggcccgttgaggaagaagggggacgatgtgcagtgtcaggttattttatcaggaaagttcaaagcttctcagaaatcttctgttggaattctacctgggtgtcataggccagaacacaacccaaataaccaggaaaaatgtgaaagtgagaaaatagatcgtccacccctaacaatggaggcagcaagtgagaggggattgggaatgtgtgttgatttcctcaacagtgtttgacataaccactttctagctttataatcttaggcaagtaactcaacttcccagttcctcttctgtaaaatggggataacacctgaaaaggttgttacaagattcactgaaatagtttctatgctcagtcagtaatcagcattcaatcaatatgagctctaacatgatgcttgacagttatgcaacgaacagttcatgaagagctttgtaagccatattgataattttgtctttatccttagcacagtgagaaggtattaaaggattttatgcagggaagtgacatgatcatatttgtgttttcaaaagagccctcaggctgggtgtggtaacttgcgcctgtaatcccagcactctgggaggccatggcaggcggtgggcggatcgcttgagcccaggagttccggaccagcatgggcaacttggggaaaccccacctctaaaaaaaaaatgccaaaaaaattttagctgggtgtggtggcactcgcctgtagtcccagctgctcgggaggctgaggtgagagaatcacctgagcctgggagaggctgtagtcagctgtgattgcgccatgcactccagcctgggtgacacagtgagaccctgtctcaaaaaataaataaaaaataaaaaaaggagccctcaatttatcctctgcctctgacaaatatattccattttgttacattgcaaaaatttcagcacattgctttgcttacccatctttgctctggaacgacttttaattcttcttttggcaatcttggttgttttgagatgtgtgaaattagaatcatatgcaggtgtttgagttcttttgattttgctttttaaaagagttttttttttgttttgttttgttttgtttttagaatggggcaatgtaagccagatatcaacgtcctttggtcagattttcaaacctattgggctgatagtacacttacaagaataggtaaaaaagatcccaaagattttacttcacttacttgaactactagccctactattaagagccacagcaagcttacatgttcaaaaaaaaaaaaaaaagagctgcaacattcctttcgcactcccactcgcccctgaggttcttccacttccttcctatggctttttttagaagcgagtgtgtttttctcacgtccggcaacaaaggatgttttgtgctactactgaggtttgtgtgtgtgacttactttagaactctttctagaaaatgcgattactatttgcataggtctggtagaactttgtattgagtgaaagtctccgatgactgtttttgtttttgtgtagatttgccactgcttaacatcaaatcactttcccctgtgtgttttaaaatacctctaataggacctgtcaaaattctcccagaagtctcacaaattcttacctttaaagaaagtgtaagtgataccttcagtgtattgtatttattcttatatacctttgcaaagacttctcatcacttccttaaatatgtctgatagtgccataatgagaaggggacatggtaattaaccatcaactttggttttcatggagaaaatctatctggagcagtcacagtatcctatgctggagctatcagatgccttgacattagatgtttccatctaattgtaattctctgagcaaggagacaaggtgggataaacagaattctcagatggctgagaattataccctaaatcctgggagagaatttacctttccattgtcagataatatgaatcatttaaaacatgtgctggaacagctttgccttttcttgaggaaaatggggtttctctctcaaagagaaagataaatgcgcctcagaagattttagtggtcgatctctgtcagtgtactaccagcaaaaatcccagcaatcaatattacaaagaggcagcactcacttgagtacagaagtaacaacattagctgcttcgtaaacaagatggcatgggagatattctgttttgagtaaatgacaagtcctacagtctagataggaagatttctcctccatatggattttgtgatttcgtcttgtgttgagtaaggaaggggagcttggattccaagatcaatttaatgtctatattccttggcattgtcatgttagagcagcacatctcagatggctttcaatagttattttagcattgattttcctctactagagtaaatcaaaagatgatttagaaaatcaaagtcagttttccttggagttttctcagaataaagggaagctgtggtgttgaagggtttttttggctcctatttacatatgatgcaaaatcaatctgtgtgaatctctttcctctgttgagctctactataggctctactatatgcagagccttgggtatttctgtgcgagggggattatgcaaaagaattttaaggcatgccacttgactttgtgaaaccaagtatttgtttaaagagacacgatattatagtgggaggctgttttgtgagaacccacactttcatgtcagcaccctgagatgggatcccattacgccctttaaccaggcaagggactttatgcagttcttcgtcaggaaaatggagacaattaaactgcttttctcataggttgttgtgtaaaaggcagcaagatgtggctgtgtaagaacatgactgaagccagactgcttatgcttaaaacctaggtgagctgtttacacctgatatgaccttggacaagtctcatctaacttctcttgcctcaggtgcctcatctgaagatagcagtgatgttagtgtctgcctcctgcctcataagcctgtcatgttgagaccatcctggccaacatggtgaaaccccgtctctactaaacatacaaaaattagccaggcatggtgacacgcgcctgtagtcccagctacttgggaggctgaggca

SEQ ID NO: 263 - DNA, 51961 bp, Homo sapiens
tttttgttttctgtttttttattttttgtatatatagagtgaacttagcccacccatgttgatagaacaccctcttagatgtcttgttctgtgtgcccaagtacatgccggaatgtggagaagaaatgggttctctctagtaaaccaggtaagtgttttctaattctatgaagagttttcattccattcttggcttctgtgaaggttgtaattttcagtggacttagtcagtgaaagctgagtatctatattaaaattgtttgaaaagattaatgataaaacaaaaagtttcttaaaacttttattcatagtttgtcaagaaataatggaaaaagtagaaatgaacaacagtggtcatgacttttacttgaaataattttttgggacaaagttggatattaaaaaataaaaacccagattttatctatttaaatcaaattgaattaaaagataaaaggccttttaatatagctgtaaaattgaggttttactttttatagacctcacataggcttggaatgaatttttttttttccaagatcagacaagatctggcacatttggggtggtatagccataaacagattttgtttttctcctgtgtttggtagctcctaaccttcctgagaccacaaccttttactttattcagaaacccagcaagttagctgcaaaatgtgaaccatatcatgaccactgtaatgtgaaaatctgtaattaattaatctttactaagataatgttaattgttagagaaaccacatcacacacatgcacacattcttgtacaaacttgtgcttttggggaaggattagagagagcctgagccaataaaaactatttactcaatataattacttttttttttagatttattactaccataatgtgaaatgcagacgtgagatgtttgacaaggatgtagtaatgcttcaggtaatgaattaaaagcattgaacttaaaggttgtggggaatctttgcttcttgttatttccatagaattcagtcacttgtgatcactcccaaatctacaactccagcctagccctgtctcctcagctccaaactcatatggctaacagcctttagatcatttccatctatatttcctagacacacttcatattaaacgtattcagaataactcctcatgtttcctccataccttcttcctgtcttcacttccctaccttggtgaattgttccacagtctacctagttgctaaagtcatatacctgaaagccatcctttcttcattgtcctctggttctttaactaatgtactaatgttaaacctcttagtttaaaccccttaaactaattttcaggactgcgatacttaactgcattgaagttccctgaatttgccatattctcatacatcttaaactctgcgtatttatttcttttgctccctaagttacccaccccttctttttccatttacgtagctaacttattttcctgcttgtctttgtgtttactttagcattacttcctccaggaagccttccctgacacactaaaacttggctacgtgtcccttttgtgaggaccctagcatggtatttaaccctgccgtagcactcacaaccctggactgtgattactgtttactcttcagcaccctacccccaccccaccaaaccatggcagttatatcttgtttctttttttgtcccttttgccttgcatagtgcttgtcacatagtagttgttctctgatactgctgaatggatttagtcattatagaaaaataaagctggctaggcacagaggctcacacctgtaatcccagccttttgggaggctgaggcgtgtggatcacctgacgtcaggagtttgagtccagcctggccaacatggtgaaaccctgtctctactaaagttacaaaaattagcctggcatggtgtcatgcgcctgtagtcccagctacttgggaggccaagacaggagaatcacttaaacttgggaggcggaggttgcaatgagctgagatcactccactggactccaacctgggcgacagagtgagactccgtctcaaaaaataaataaataaaaataaagtcaagaaatgtatatttcaaaaaaatattagttcagaataaaatctaggtttatttataatttatacaaatggaattaaaagagaattgaaactaatatttaaaagctgtcacttcagtcagtataatgcttgccagaaaaaaataggttaggagatcttgataatagtttaatatgatctgtatttttaaaatactagaaggttacttaatataccacatttccaagtccaaacggtgatcagagaaccccaaaataaaattttggcactgaattcataggaatacaattattttaaagcattagaaggaaagagaactcatagtctgtgttactgtgctgggtgggcttaggtttggggcttgtttgtattttgttttaccaatttagattcctttccacacttgcctgctaccacaagtaaggattgaggttaaatgggttttcatcttttattgggattggtgaaccttttaggattggtaaactgctttctcttgggcaagccaaactatctctcactaattgtttcaatagtggcccctttgaccttcctcttttcctttatctcaaacattaaaaaaaaaaaaaagacaggtgtctccatgatggatccaaatcatttcctgatgatcatgctcagccgctttgaactttatcagattttcagtactccagactatggaaaaagatttagttctgagattacccataaggtaagaacgtgttttatgaaaccacaacacattgctaaagaagcatctttccttctttttggatatgttaatcctctgagattatgcaatatgcatattcttatctctgaactttatcttccctcacttgttataggatgttgttcagcagaacaatactctaatagaagaaatgctatacctcattataatgcttgttggtaagtttaaattgtttgaggcatttaataaattacactgacgtttatagtagcaaatagtttggaatttctggcctgtgtttcctttgttttgagaggatgctcagtcttaggggaagagaattggaatatttctctttttctcccctctggttactgtaatattgagagtaatagcaccgtggtgctttggaagaaggagaaaatacaactactgaagcagaataaactggaagactgtattttgcgaggtggtggtagggggagcgggggacaggagaatttagcaatcaaggaataggatatttaagatctatttactcttgatttatatcttaactatgtttctctccatgggtttgtggtacaaaagtatcttcttgacttcagatacaataattccaagctaaaggagacctgtggctaatagatgtggatttcttcccttattacctatattttcagtcctttactactgttttagaccccctgcagtccatagagcagagaatcctggctactgtcaggagatgataccaatgaagaaagtctccgaagttgatattttatttgccactagatagtaggggaaaggaaggctctctctccttgctgccacaaggagaatggggtaaatgcagtttccttgaccacatttaatcccttcccacatttctgatcccattctttcaaaacagcagaaagagctctctccactacctaaagcctgccctcacgttttgggtctgagacacagaagcatggtcaggagctgctctctccctggcttattgcagaacagtcattactttcccattgctcagacagacttagagaaatataacatgctgcatgaattataagtatatatcacgaaagtattgtgattatgttaaatgtatgtatatgtacttttccatttttgacaggagagagatttagtcctggagttggacaggtaaatgctacagatgaaatcaagcgagagattatccatcagttgagtatcaagcctatggctcatagtgaattggtaaagtctttacctgaagatgtaagtacctacatttctaaaaagaaaaccatagaaacttttccctgcctatcagtctagtatctatagatttacttctgtatacctttctcacaattgtaaaatctattgtcatgggatgtgtataattccggtcactcttattatgaataattagaaaaagagaataggagtagaaaacagaatagtaatagaatcttttacaataaagccttgaggaagataaggacactaaacaaaaagtagcccaaacctcagaactaaggtttgtaccccacagaaagaggtcattatagggtctttagtacaaagttgctatgggtgtggataatgctttgtaacctagtatattgaggaagggagtcagaagtgcctactcacctatactgagtagaataaataatgttttcctaagctttttccttcttggcctccagagagtcttcttaatgacgagcccttgtttcattttagtgaatgcaaaataatagtgaaaaggacattcataggttaaattgcaactgtttttccttccaggggtgataagttccccagcaacctatatttcagccatggggtttttcagaaactcaacccttataattgagaagagactttattttcattgaggcttttcaaaatgtttgccctaatttgaaacatagatcaaaaccttcaaccttaattaacatttatttttctgagatttcaacctatcttatctttgttgcatagtaatacttttaaactttgtattataaatatttcaaacatctatagagattaaaaaatgtagtataacaaacccatcaccagcttcaacagaggccagtctggtttcatctatacccaaccactaacctctgtgccccactgtattatttcctagagaatactatatttaccatttcatctataaataggactatatgtatctaaaacagtgattctcaactgaggacaattttgccccccaggggacatctgtgaatgttactactcagggcaggatgtggaatgctactggtatctagtgggtagaggccagggatactgctaaacatcctacaatacccaggacaaccccctacaacatatctgatctgaatgtcagtagtgctgaggttgaaaaactctgatctagaaaatgaggactcttaaaaaccctatctttatgttatcacacttttaaaaacaataatttatatatatatgtttatatatatatatagagagagagagagagagagagatagagtctggcttggtcacccaggctggagtacaatggcatggtcttggcttactataacctctgcctcccgagttcaagcaattctcatgcctcagcctcccaagtagctgggattacaggcgcacgccaccatgcccggctaatttttgtgtttttagtagagatgggggttctctatgttgtccaggctggtctcgaactcctggcctcaagtgatctgcccacctcagcctcccaaagtgctgggattacaggcataagccaccacacctggccgaatgatgaataattccttaatgtcactaaatatctagtcaagataaaaattacttgtactgctttaatgcaggaagtgaatcccaagttgttcaattaggaagcagttataatttagcctaagctttaaggaacaataaaatttcaaaaagcattttttaagtggtttaagattgtcggccgggcacagtggctcacgcctgtaatcccaacactttgggagaccaaggtgggcggatcaggaagtcaggagtttaagaccagcctggccaacacagttaaaccccatcgctactaaaaaaaaaaaaaaaaaaaaaaaaaaaaattagccaggtgtggtggcaggcgcctgtaatcccagctacttggtaggctgaggcaggagaattgcttggacctggaaggtggaggttgcagtgagccaagatcatgccattgcactccagcctgggtaacaatgtgagactctgtctcaaaaaaataaaaaataaagtgattgtaactgtatttcccaaacattttaaagaattatttattcacagaattcctattaatatcttatcgtgaatgagatatgattggggaagtgctgttgtactgaaaatagacaagaaattagtgcaactattttataaaataccagacgtattttacataaacttttttaaatgttttatatactttgtgttttcatttaattcctttagaaagctcttaccttgattctatatggcagtgactttttaaaaatcataaagttttatctattttatgtatttaaaaataatacatcaatttgaataaacatcagcttgccgagtaagtatgtctagttttgtattaatcattgtatttgctatggaatcctcatctgtaaaaatggagataaggtgtatctaccttaggttgttatgagggtcaatgagataaaacacaatgctaagagtgctagtagttattattaacatgaaacacacttgtgtcctgtacctttaggagaacaaggagactggcatggagagtgtaatcgaagcagttgcccatttcaagtgagtttacttcctattatttcacattcttttttacttttccagtacattcatttttcttagagtgttttctttgatgcaactgagaatgaagttgcagctttcagagattgacagacattttcaaattatagctctgaattagatttctcactgacatttcacttttctgatctcaccctgtactcagcaacgtaaagtgacattgtgagggttttcgtcacattcagaataggtgttcatagctgatggtttcaaatagtaaaaattaacctcagcagtgatctaagtaaatgcattgtaatttcttaaaactgttttgtttccatttgaatgtgctgcctaaattgtgggatagcctctcaatgccaccttctccagtgtccacagtcttcccccagtcaataaactggtttatacccttaaagatattaaagcagtttcttaagcctgttttttctttgcttcctaccccaatgacaatgtattcattttttttaacccactataaatttttgaagatagtgtctttattttttgttggttataaagacaatacttgcttttaggaaaaatacaaagaaaaaatattacctgtaatccaaccactcagatgatttctattatgtttagatgtatatctttctaaattttttttctatacttggaacacatatttataacaaaaaatgggttcatttcgtatttactattctataacctttttaaaaattaaataatggaatgtttccatgtatttgtgtctttgggggggcgggttgttggttttattgggtttttttagtttttacataatatactttgtcagtacatataggcatacttcatcctttttcacttcagcctgggtaacaaagcgagactcaagtgcagtggcacggtcttggctcactgcaacctccgcctcctaggtccaagcaattctcctgcctcagcctcccaagtagctgggattacaggcgcccgccaccacacctggctaatttttgtatttttagtagacatggggtttcaccatgttgaccaggctggtctcaaactcctaacttcagatgatccagcccgcctcggcctctcaaagtgctgagattactggcatgagctatggtgccaggccctttttcacttccttgtagtcatgtactgtaatgtatctaacctcttccctataatacatagcttccagattttctcttataaacaaatattgaaaatccttgtacatacagcattaacaaatgtatctttgactgtgaaagtgtttctttgaggattagctagatcaaaatgaaagcttgtattacattttggtacatacctcctaattgccttcccaaaaaagtcctcgatttacactctgactagaagtgtataaagagtgccctgcaactttgtcaacactttaatatgagcagtctttcagtaccttattttaatttgcgttactctaagtgaagttgagcttcttttcatgtgtttattggccgtttattttttcatactttaatgcatttttctttatggttgtttgtccctatcttattgttccgaaagtattatatattagaaatgtcaattcttatttaatacatcacagtactttcttccagtctcccttgttttttaactttctgtttttaaaactctgtctcaattggcttctgggttttataacttgcttaggaaagttctctaaaccccaatagtgtacctgcttttttctgcttaatagaacaacacggaagtctttacatgtgaaaatagagaaattatcactgttaatggtgttcagttgtttggagatgttgtaatttgttatttcacgttattagactttttaattgttgccactgcagtgtccatcacgttcacttgtctagttaggataaattccaagtgggcatgctaaataaaacagatgcatgtagaactcggatttagactgccaaatcaacccactgaaaatagttgtagcttaacacccaccagcagtatatgagagctctgctttcttgttctaatatccaagactatctctcataaattagtgtatggctttggtaataatattctaaggtcctttctttcacaggaaacctggattaacaggacgaggcatgtatgaactgaaaccagaatgtgccaaagagttcaacttgtatttctatcacttttcaagggcagaacagtccaaggtaattgggaaaattaaaaatgtagcagggaaggattgcattgtttttcttaagagatgaggtttcaccatgttgcccaggctagagtttggtggctattcacaatgccattatagagcattgcaacctcaaactcctgggctcaagcaattctcccacctcagcctcttgagtagatgagattacaggcatgcaccactgtatctggcttgaatttttttttcctaaacaacttttttactgcttttgcagattgaaaaatgatacatttttattgtaggggatttggaaaatataaaatataaagaagaaagtagaaattacttaaaataccctcacctaacattttggagttaccccctagcgttttgtacatatgtatatacgatctatataatacatacctttacgtatatgggtatagttttttaaaacaaattttcaacctgtattataatcagttaatccattttatgcacatttcagaattggtattatttaacactttttcatagagattcatggagcttttctaatcattcctaggtaattaaattttgcctttttggtggggcatgtaatcccagcactttgggaggctgaggcgggcagatcgcttgagctcaggagttcgagatcagcctggccaacatgttgaaatcccatgtctactaaaaatacaaaaattagccaggcatggtgtcatgcacttctcgtcccagctactcaggaggctgagataggaggatcacttgagcccaggaggtcaagactgcagtgagctatgattgcaccactgcattccagcttggatgatgggagtgagaccgtatctcaaaaaaaaaaaaaaaatctgccttttagcagtctcctcttaaaatggtttttcaataaacagcattaaataaaacttaaacataaagcttttatttagtttttgatgaagtcatagagttcaaacttaaataagtttgtacttatttaagtacatgtttcccttctaatttaaagtaatagagaactcgtttggagattcttttagttaaaaaaaaaaattaaccttgatgtatccgtttgggggaggactagaacttaaagatagatatcttttttattttttattttttttgagatagggtctcactctgttacccaggctggagtgcagacctcggctcactagagcccctgcctcccaggttcaagcaattatcctgccccagccttctgagtagctaggattacaggtgtgtgccaccacgcccagccaatttttgtatttttagtagagatggggattctccgcgttggccaggctgctctcgaactcctgacctcaggtgatccacctgtcttggcctcccaaagtgctgggattacaggtgtgagctgccacgccccggcctctgttgtgttattttctgattttagatgttcatccttggccagacacattggctcatgcctgtaatcccagcactttgggaggttgaggtgggcagatcacaaggtcaggagttcaagaccagcctggccaacatagtgaaaccccacctctactaaaaatataaaaattaaccaggtgtggtggtgggcattactaattcccggtccaaataactttattttttattaggcagaagaagcgcaacggaaattgaaaagacaaaatagagaagatacaggtatttttaatctttctgaaaatgtcttgcccatcttttttgcttgttaaacattgttttctgttaactatgatgattgtccttggtggaatgaatatttaaatgtaagctttcctagtgaataacctcctattcagaggaataataaatatgttaacacagaaatagtttgtgctaagtcctctgggttgatgttatctcagatcttaagacctttctaggggaaaagatagactttcttctgtactgctgctactttcgtggctctttttatgcatttgaccttgagaatgtaaaataatagctttaaggtgtgtgttaatgaatattctttgagttaaaactatcaaaagtaacaaagagatagtttctaaagcatgttctgtaaaagaaaccaataataacaactgtattttcagcactcccacctccggtgttgcctccattctgccctctgtttgcaagcctggttaacattttgcagtcagatgtcatgttgtgcatcatgggaacaattctgcaatgggctgtggaacataatggatatgcctggtcagagtccatgctgcaaagggtaggtttgaagacatttattatttatattttagtattttatagtacaagcaaaatattcttgtctgtatctatacacaggaaaactaggccgaaatgtattgtgttttcctaacttgaatatattgttactgcttttgtgtctgacagtaaaaacaagtgccagacagatttttttataccacatggttgttattacctcagtcccactgggcagttgttctctcctagattggtccttgtctttatatatgtagtattctgatattgatataatgtgttatcttttatatatgtttctaatctaattattttccaaaacaaaaattttttttgaatcatccatatccttattttgtagttgaagaaactgacactcatagacttacggtcctatagctagttaagtggcaagtctggaaccttgtttgtgttatttttgtttttgtgtttttgagacaggatctagctttgtcacccaggaagctggagtgcagtggtgcaatcttggctcactgcaacctctgcctcctgggttcaagtgatcccgccacctcagtatcccaagtacctgggattacaggcatgcatcacaacatctgcgtaatttctgtatttttggtagaaacagttttgccatgttccccaggctggtctcaaactcccagactcaagcaatcctcccccctcggcctccccaagtattgggattacatgcgtgagccactatgcccagccccttgtttgtattttactttatagttttaatgtaagccgttcgtacactatctcattgaattcacacaacaccccatgaatagatacaacttttttctcattgttagatgaggaagccaagtttcaatgaggttccattaacttcccatattaatctactaagtgatataacaattattcattaaatagaatgcctactttatgccttattccatgctaagcccttttttttttttttttttttttttttttgagacagttttgctcttgtcacccaggctggagtacaatggtgtgatcttggctcactgcaacttctgcctcccgggttcaagcaattctcctgcctcagcctcccaagtagttgggagtacaggtgcctgtcacgaagcccagctaattttttgtatttttagtagagacagggtttcaccacgttggccaggctagtctcgaactcccagcgtcaggtgatccactcaccttggcctcccaaagtgctaggattacaaggcgtgagccaccgtgcctggccatgctaagcactctgcatacagtatttgtaatcctcagaactctagagggaagctttgtttttccaaggctaaagatgatgacttgggctcagaggcgttcccttagggtatatattaatagcttgaaagcagtaaaaccaggattcagattcaaattttggagccctcctcgggaggctgagtagctatcattctttctttttgtctcactggctaagatgtgtgtattcttataatgccctcctatttatctataagcatatttaaagtgtaaaagcatggagctgtggtgtactagctcactactagtacagctgtactagctgtcgtgtactgtcagcattacatgaacaaaagatttgtgggaaataatggagagaagaggtgtgaacaatatttaccttacatgtacacttgctttatgtcacctagttcttccaagtctctgacaaccacagtcatcccatgtgaagggaaagatacagagacatcacacacatatctccttcaaaatctggggtgtgggcccggcacagtggctcacccctgtaatcctaacactttgggaggccaaggcgggtagatcacttggggtcgggagttcaagaccagcctgtacaacatggtaaaaccccatctctactaaaaataaaaaaattagccaatcgtcatggcacatgcttataatcccagctactcaggagggctcaggagaatcactggaaactgggaggcagaggttgcagtgagccaatattgtgccactgcactctagcctgggcaacagagggagactccgtctcaaaaaacaaaaaaacttgggcatgggataagagcagtaaaaaaacaaataggttgatacagtctctagaagtctggtcaggaatattttgtgagatacactgaagaactataaagtttataaatgataaggcattagagataaaagtttgtctttctcagatgatgaagatttagtccttagagaaattaggtagtgtcatagactggataattacatgggggatacgtttagctttataattacttgaccactaattcttggaaggtttttttaagtctgtagtataggtatagaataaaacttacatattatgtgaattgctggtcacagctggtgtaattttagcttaccctgaggatttgcaattgaaatttcttcctcattgaagtagaaaattttgtttttcttgacaataattgtttgttagaaaataaacctcagtcttttcatttaataaaaattagtacttcaaggccgggcatggtggctcacgcctttaatcccagcactttgggaggccaaggtgggcggatcacttgaggtcaggagttcaagaccagcctggccaacatggtgaaaccccatctctactaaaagtacaaaaattagccgggtgtggtggcacgcgcctgtagtcccagctactcgggaggctgaggcaggagaatcacttgaacctgggaggcagaggttgcagtgagcctgggtgacagggcaaaactccatctcaaaaaaaaaaaaaagaaaaaaaaattagtacttcaaattgtttttaattgcatttagtatttcatagtttgatttatctttttcaataattcttttttcctatttcttattaaaatatgtacttgattttttaaatttttactaaaagttacaaaacatttattcaaggtgttacatttaattggcatggcactacaagaagaaaaacaacatttagagaatgtcacggaagagcatgtagtaacatttaccttcactcagaagatatcaagtatgtatatatctttttactaaactaactcaagatataaatgattttaagaaatcacttaataacctcttttatttgatcatatagattctaaaagggtaatatttaatccaaacatttgaggctatatgtactcatctgtgtagtaaaggtactgtattaaaccctgatacatttttataaaaatatctagggctaagttcaaagttacagtcagctgtggttgacgtaagattctacagtattgaaaataaaaaaaaattataggggattagattgtcatttcatataaagaaatgtgactttttaaaagaaggccagggagtttttctagctttttattttaaaaatttcatacatatagacaagttgaaagaattgtccagtaaacattcatatacctgctccctagattcagtagtttgctatatttgcttttatatttacatactttcttgaaccatttgttgtagacataatatttcatgtctcaaagaaaagcttctcatttactaattttcagaaccagccattggtctgatagttacctgcaattgtggcaattttgaatgttttttgtttagagtttttttaaatattattcatggatttttattcagtgttttatagtcacttataatgggtattccttttgatgctcaaattatgcccattttggtcagtgggagtttatttagtcagcttctgtgtccttttcacccagccccatttgtatttgagtaccacctcgctttccagcccaaaagatgcccaagctcatcttgtactttccctgccacagacctgtagtcagccatttgctgaagtgtttttaaatgaattgatggtgctatgataggagtttataaatgctttgattgaaaaggattatttctgtaactgtgttcagtgccatttcttcctaaacgataactgtgagaattatactaccaggggacaaggaggaagtaattttgtttgctgctagatctctagttttcctttttgccctcatccaagtaaatgagagaaagaggagaaaccaccttttcccactgaagactttattcttggatgccagtttttacctattctttttctctgccatattttctttggattaatactgttgtttttgctttctttgtttctggtgtgtttattttagaataaccacacagaatactccctaatttcattcactcatcactataaaatattaggttcttggccaggcatggtggctcactcctgtaatcccaccactttgggagatcaaggtggatgaatcacctgaggtcaagagttcgagaccaacctggccaacatgacgaaaccctgtctctaccaaaaatacaaaaattaaccgggcatggtggcgggcgcctataatcccagctgctcgggaggctgaggcaggaaaatcgcttgaacccaggaggtggaggttgcagtgatccgagattacaccactgcactccagcctgggcgacagagtgagactctgtctcaaaaaaaaaaaaaaaaaaaattaggttctctcttactttctctttccttattaaacaatcatcattttccctcaacattactcttaacttgtctttagacattctacataattaagacacacgatttatttccaaagaaacctctcccttatctagagtcacatctctaatgcatgccacagttttagatgtgatagaatattaaagatcacacaggtcaatctcttcccctcttaggaaaaagggacatttttccagaatggcagcaccaaaatcaagaaaatcaatagttgaactttctggctacagactaatagaaaatatggacttgactcttatattcaaataaacaaactatgaattcctaggagaagaaattcattttattctgaatctagtttttattaaagtcaatggtcagagcaaataaacatatttgtgcatatatgcacctcttaatgctaatttatttttagacctgtaaaatctgagacaccacttatttttagctgaatttgtatgtaattttgctaaagggatgttaaaataatcatttgctataaaaagtcacttttgaatccttaaagaattctagttgttggcaacttgtttgtaaaagacaaatatgtcacattctcaagaagtattgaaaatctctattttggtagagccataatcaaattatgggcaataggtgttataagcaactgcatttatgttcctgtgcgtaggaataagtactatgaagtattagctattgttattgtgccttttatttttctgccgtagaacctggtgaagcgccaaaaaattctcctagcatactagctatgctggaaacactacaaaatgctccctacctagaagtccacaaagacatgattcggtggatattgaaggtaaaatttccacattcctctgctttttgtgagaaatattgaatatttgttatgtgtacattgtgatcatatttcatacaggatactgatacttttttttttgtagacttttaatgctgttaaaaagatgagggagagttcacctaccagtcccgtggcagagacagaaggaaccataatggaagaggtataaacagtaaaaagtgtgataatactaaaaaattacagcaagttcagtatgaacaaaataaatttatctacattaagttgccagttactcacaacatttaaattccaagaaatatgccactatttatctctatttgttgtagcaattttttgtctgctttttttctttaaaacaagtcagtttaagagtcttttctcttatttaaataagtgagattatagaatagttttttaattggtatttacagtgaagatatttctgctttggaaaaaaatgtgcgttttagcatctaattgtctaattgaatggagcataatttcagagttcaagggacaaagacaaagctgagaggaagagaaaagcagagattgccagactgcgcagagaaaagatcatggctcagatgtctgaaatgcagcggcattttattgatgaaaacaaagaactctttcagcagacattagaactggatgcctcaacctctgctgttcttgatcataggtaaaaaaaaaaaaaaaaaaaattaatgtcttgacgagtttttcccaactaggggcagtgttgcgttttctccttgtaagtatacttttaatcctaaagtaatttagtagaattcataggtaaattttgtgacctccatttagaagatttaatcttagaagtctctgaatgtaggtatggtaagtcctgtgtacacctggtagggtattttctgcagaagaccttggacattcatgaaagaatgagtacactacactcagttacctagagcgtatgacatctgtgttgaagattagattactgtgaggattaaaggagatggttttgatacataccaaagacttgacaatccaagttatcaaaaccatgtgttaaatatatacattcctggctgtgcgtggtggctcacgcctgtaatcccagcacttcgggaggccaaggcgggcggatcacaaggtgaggagttcgagaccagcctgaccaacatggtgaaaccccatctctactaaaaatacaaaaaaaaaaaattagccgggtgtggtggtgcatgcctataatcccagctactcaggaggctgagtcaggagaattgcttgaacctgcgaggcggaggttgcagtgagccaagattgtgccactcaccccagcctgggtgacagagcaagactctgtctcaaaaaataaataaatatatatacacacacacacacacacacacacacacacacacacacacactacacacacacacacatacctgtagtctgctattttgtgattatatagaaagttttgggatcattaattatattcataacctttgtattgcagccctgtggcttcagatatgacacttacagcactgggccccgcacaaactcaggttcctgaacaaagacaattcgttacatgtatattgtgtcaagaggagcaagaagttaaagtggaaagcagggcaatggtcttggcagcatttgttcagagatcaactgtattatcaaaaaacagaagtaaatttattcaagatccaggtaagtcatagctagatcctcatcttcccttttaataacaactgccagttaatgtggttggtgatacgttgagattttttaaacctaaaaataactccatggacttggatggtatctttggcaggtaacttaggcaggaattccccacttggcagatgtggaaccactccagaaagttgcacctgaatcacatagctgataaatagcagggattcaaagaaaagcttttctttgtgatgtaacattacatactttggcatttcacagtcttttccatccttcagtacacttgcaaagtcctggtcatttgttgacacactgaaataataattgttttgtcttattgatagagcctgagtggaatctcctgagaacagtgatggagagttacctatgtaagaggcaatccttgagccaaattgttttagaatagtaataccaccacagatcgggttccccagaaagcagattcttgggatacagattaccgtgcaggacagttgagggccctctttcagcaactgagggagtaaagcagggagatccagtccgcacatgattttgtccaccacagacacatttatttctctgcttgtaggttgtgctctgtgtgcgtgtgcttcagcgatacccagtaaacttcttgagagtaggaactgtgtcttgggaattcccagagcactgctttaaccagtgcctttcacactgcagcgtgaaaggaggtttgagagcccacttttagagttgccttctctctgtaaagaaagtctttgcatcctacttatgaaaggttggtctgcttcatctttaaaaatggtcatttaggctgggtatggtggctcatgcctgtaatcccagcactttgggaggccgaggcaggtggatcacctgaggtcaggagttcaagaccagcctggccaacatggcgaaaccccatctctactaatagtacaaaaaaaaaactagccaaatttggtggcacgcgcctgtagtcccagctactcaagaggctgaggcatgagaattgcttgaacctgggaggcagaggttgcagtgagccgagattgcaccactgccctccagcctgggcaacggagcgagaccctgtgtggtttttttgtttgtttgtttgtttgtttttaaaaaaaaaaaaaaaggccaggcgcagtggctcatgtctgtaatcccagcactctgggaggccaaggcaggcagatcacaaggtcaggagatcaagaccatcctggctaacacagtgaaaccccatctctactaaaaaatacaaaaaaaaattagccaggcgtggtggcagttacctgctactcgggaggctgaggcaggagaatggcgtgaacccaggaagcagagcttgcagtgagtcgagatcgcgccactgcactccaatctgggcgacaaagcgagactgtcttaaaaaaaaaaaagatatttaaactaggtgctttataaatttcattccaggccaaagacaaagttgctaattttatttaacttattacttctgaagaaaaagcattagctggctataagtggattttcttaatgctttgacatttgcactgttctagtgttaaagcaaattaaaactattaaagcaaattaaaagtagttctttctagagtgttaggaaatttcgaagattatactaatttatataaagaattcaaaaattccaaaagaagccagacatccatcttgtttttcatgatttttcatcccctttgaatataaaaattagcaccaggacagaagactctgaattaccttttttccccccatctgatctggtctgtgcttagattttttgttgtcactttggctctgatgtgattattcgctgtatgagtgttgttaggcagtctgtcctctagggggcgccccgttactgccaaaacattttttattagcgatcattttaacccagctgccctgaacgcacataaggcagccccatgaagagagtagctcttttacctggagctcagggtacaatgggaggaattggaatatctcagcaccctgaaagtgtgaaatgttcaaaagattggatatatttaaattcatagttctaatttcagtttaacaatttgagaatgtttaattaatttgctgtgggtggtgaaaattagagagtcctactttctaaataatccaaggtgttgcataaattggtatctcagaggaataaactagcatttcatttcaaatttcaagtctttatcaaggattttacaatttaaagttacacatttgttataggaaaattaaatgcttcacttttgttttgttttgttttgttttgtaatgcagaaaaatatgatccattattcatgcaccctgatctgtcttgtggaacacacactagtagctgtgggcacattatgcatgcccattgttggcaaaggtaatgtatattcttaatatttgtcaagagaagtttatctaagggctcaatattttttaaatagaggaaatttcattctagaaaaaaggaaaagaactaaaaatgttgaaaaaatccgtatcattgcctaataaataacaaaagttatttgccttgtcatagatgtaaagtgtatgtcagatatgttttttaatttagctttatatccaagtctcttctatatcttccaaagaaggaagtggatctgtatcagtctgtggatgaagaaaagggtttttacagtaggataaactctagaagggtaatgttgtctttctttgggtccagggtggacaacttttgattccatagatgttagtacttgctttgttacttcccaaaattgtaatggctccctgtgatgagatgtcctgaatttgttctaccttggtgtttcctatgcttctacaaaaccaacaaatcaataatactattattctagaactatgctcacccagttatcatgaactacccctaacaactagccaccacattgtagtcccagctacttgggaggctgagacaggagaattgcttgaatgtgggaggtggaggttgcagtgaaccaagattgtgcaactgcactccagcctgggcgacagagcaagactccatctcaaaaacaacaacaacaacaaaaaaaaaacaaatagccaccagccttggggaagtggcaagagaacaatgacaccaagaaatttttgttgctgctttgtgaatgcttttttacatggcagtctttttttttattttactcttttagaacttttaatccatttggatttttaaaatcactcaaaaatcatgttaaaaataatttagtttaagattttcatttttgaactatttgtggaaacaaattattttaaatgttgaagcttatggctgtcatttatgtaaattaccattgttttgatacctcatgttctctaattgtaaaggtattttgattccgttcaagctaaagaacagcgaaggcaacagagattacgcttacatacgagctatgatgtagaaaacggagaattcctttgccccctttgtgaatgcttgagtaatactgttattcctctgctgcttcctccaagaaatatttttaacaagtaagttttggctcatgacaactattacaaagcaatagtttgctttgaagataatgaaataataaatcaaggaggaaaacttagtctaggcaattgcatagtgttttccagatactttccaaactctaatcattttcttctagcagacctgtggaatgtgattttagtttttagagaggaacaggtgaaaatttaacagtttctaagctattaaattcctatgtatttatgaaaaccaagtatctggtttatttctagggaccctacttttaatatcttccatacacttttcaagagatgctcagtaaactggtagagggagatggaacaactcaaactgactttataggacagtctaaaaatcgaataaaactttttgctgtactggccattcatagttttaagaaccaggcaaaaaagtgaaaatctgttggtatattttaaatggaaaaatctcagctgggcgttgtggctcacatctataatcctagcactttgagaggccaagatgaaaggatcatttgagcccaggagttcaagaccagcctgggcaacatagtgagaccctgtctgtacaaaaaataaaaagttagctggatgtagcggcatattcctatagtcccagctacttcagagactcaggtgggaggctcgcttgggtcaaggctgcagtgagctttgatcatgccattgcacttcagcctgagtgacagagcaagaccctgtctcaaaaataaaataagtgcttgcttcagcagcacatatactaaaattggaacgataaagagaagataagcatggctctttcacaaggatgacacacaaattcatgaagtgttccatatttttagctcttttagaatttgtctagcagactaaaaaaaaataagaaaagaaaatggaaaatttctgtaacttcacagttttttggatgcttttagttacgagtattggacatactcatttcgagtatgaatttgataatgtctgcttttcgaatctgaacttcatttctcaatgtagaattatgctatctacgttgcatgcacaaatactaagttatgtgagtataaacgatccatttctgtgttatttggattcagttcaaagcaaagtcagttttttcttgtcagttttaggagttcaaactttggtgttcttagtctatgctaccacaaaatgttcttaaaatattagtagatttgagtgtaagctcatgctttttaattataaaagaatatcgtggtactgacttatctgcatttgaactgatgaagaaattaattattgttagatggaggattaactgtgtataagaagaaatcacccttgttggatttcatctgtcactttattggtccaatttttgggttttgcccatgagattcaattatggtttagtcatattcgaatacaatcataaaaagaacacaggctttggaatctgacagagccaagtttgaatgctagctttgtcccttattcggccttagtcaagttacatagctctaaacctcagtttcctcatctgtaaaatggggacaataataaaacctattacaaaatataggaatacaacctatgcaaataataatacaacctgaaacaaaatgtagggatattttgaggattaagtctaataccataagatatttacagtaaaattccttactaagtgcttgtaacataataagcacttggtagatattaatagtgatggtgattatgatacttaagaaattctagcaaattccaatactgaagagtgagatttttaatacacagtgttattaccatcatattgacaaataatatattcctttccattggccaatatcctgattttttttaatgcaacaaattttcccttatcctttttgtttttaatatttggagtgtgtctaaaatatgcctgtgatcatttaaggagtcttttgtatcttaaggaacaataataaaacactaaatactctctataatcttttctagcaggttaaatttttcagaccaaccaaatctgactcagtggattagaacaatatctcagcaaataaaagcattacagtttcttaggaaagaagaaagtactcctagtaagttctggtaacctgttttcatttttccctaaagtccgaggtcatcagaaaatgtatttccagaagaagttgtttaaaagtgaaacctcccatttaaaattttgactcattctaattttccttgtcttaataaactaaatttgactttactgcattactccttattccttaaacacacaagctcatgtgaagtttctaataaacacttctcacttattcccccattttattgaagagcttctggaggtgggggagatgtaactgagtgttgcagagctagctttagttctcggtgggctaactcaccttactgttggcattaccaaaggcttcccaagtttcatagaccatgcactgcacttatgaccttgtgggaacgtagtatgaacaggatttatatcattggttttcatagaaacagaatagctactcttgtttttgttttagtggctgtactataaggaaaagcatagttaagaaagggccttggtcaactagagcaataacgttttcatgcttcatatggttgttatgccagtttttattagggaatttttttccttttgtttttgatttctttgacctatatggctgtacttttaggaatattgtcatctattgaataatagtataaaatgcctgtttctatagataatgcctctacaaagaattcagaaaatgtggatgaattacagctccctgaagggttcaggcctgattttcgtcctaagtgagtatattattttactcctttaatatttgacccatttgaaatgaatgattaagtcagcagttaggaggaatatgatttggcaagtgagggagcaaaatgttataggatactgatctttagttgtaaggtttaagcagaggctgagacaggaggatagtgtgagccccagaggtggaggctgcagtgagccttcattgcaccactacattccagtctgggtgacagagtgagaccctgtctcaacaacaacaacaaaaaaagtttaagcattacttgatggtatttattgcagtacattaaaaaaatctaagaaccatgtggcatgtttaactctcaccaccctctcctagtcagcattgctgacccctgccacacccctttctttacctggctctccttgacaacatctaatcagtaattctaaatacaaactgctcagcctccccaatgaatcccgcacttccgtctgacttcaaaatttctattaatgacctaaccaagctcttagtaacccaggattaaaaccagaatattttccaccctattttaccccatagccagttagttacaaggtatagcatagattctggagctagactggttgattcagttcccagcaccaccacttattagctgtgcaactttgggcaaattgcttgacctctgtgtacctcaattccctcatctgtcaagtgaggataattcataggtgttattaggataaagtgacataatgtacgtagagctacctgaaagctgtgcctggcatgtaccaagtaactcaataaatacagacctaaagacttgaatagaaaaaaacatcatgcctataatcccaggactttgggaggccatggcgggcagatcacttgaggtcaggaattcaagaccagtctagccaacatgatgaaaccctgtctctactaaaaatacaaaaattagccaggcgtggtggtgcacgcttgtaatcccagctacttggggggctgaggcaggagaatcgcttgaacttgggaggcagaggttgcaatgagccaagatcatgccactgctctccagcctgggcgacagaccaagaccctatctcaaaaaaaaaaaaaagaaaaagaaaaaacttcaatcttctgtctgccacactcccccagtcctgtcattttatttgtcacttctagtgtttacttccatatttctaattagacagtatcttcactgttgactggtaaattattccacaatttttggttaaatctagttgtcagtttttacattataataactgtgtttctgctgatacaagttgcgtattagaattatatttcctttcttgtacagttttgtcttttttttttttttttttttttttgagatggaatctcgtgctgtcgcccaggctcagttttgtctttcttatagttaataattaccttgtctttttcatgtacttgttttctatgtatttttttttttttttctgaatggtgcagtagatctatccaatgtctaacaactttttctttttttttttttttgagacagagtctcactctgtcacccaggctggagtgcagtggcgtgatctcagctccctgcagcctcccctcccgggttcaaacaattctcctgcctcagcctcccaagtagctgggattacaggcatgcactaccatgcccgactgatttttgcatttttagtagaggtggggtttctccatgttgcccaggctggtctcaaactcctgacctcaggtgatccacccgcctcagcctcccaaagtgctgggattacaggcatgagccaccacacctggcctcctaacaacttttctaagtgctcagatctgtccgatgatcttctgttgctaggtccctccttcccctacacagcctctgttctcctacagtcaggagggggcacagctgtcacttctcttggccctgctcctcttattttctggattgagtatcttcctctttcttaagtacttgactctttttgcagattcctaagaaaggatacctggatggtatattttcatgttcgaaaatatgtttattttattcatatgctcaattgatagtttgggtgtagaattctagggtagaagtaactttttatctagattttgaaggcattattttactaaattctaatccattgagaaattattcccattctaattcttgttcctttgtaaatttttgtttttttgagacaggttctcactctgtcatccaggctagagtgcagtggcacaatctcagttcactgcaacctctgcatcccggattcaagcgattctcctgtctcagcctcccaagtagctgggattacagacatgagctgccacacctggctaatttttgtatttttagtagagacagggtttcaccccatcttggccagactggtctcaaactcctgacctcagatgatccacccacctcggcctcccaaagtgctgcaattacagtcatcagccactgcactcagcctcattttttttaacttttttagagacaggttctatgttgtccaggttggccttgaactcctgggctcaagcgatcctcccgcctcagcctcctgagtagttgggattacaagtgtgagccaccatgcctggttcctttataactctattactatactattacttctattttctattactactttttttttttcttttttgagacagagtgttgttcttgtcacccaggatggagtgcagtggcacgatctcagctcactgcaacctctgccacccaggttcaagggattctcatgcctcagccttccaagtagctgggactacaggcatgcaccaccatgtcccactcattttttgtatttttagtggagacagggttttaccatgttggccaggctggtctcgaactcctgacctcaagtgattcacccaccctggcctcccaaagtgctaggattacatgctgagccaccgcacccaggcttgtaactctgttacttctgaaaactgtaagatactctctttatctcttcagtgttccgaaattttctatgatatttcttggtatatgaatctttttttattcattttgctaggcgttcagtaaacctattgaatctgaacattcatgtccttcatttctgagaattttttatgttgtttcttaaataattttctcttggattttcttctttgaggtagttctgttagctcactgttgcccctcttgaactgataacctaattttcttatgattttttttgctttctacattgtctctgttttccctgagttctgtttctctgctcctttgttttggtttatctctttgatgctttccttaaatgtttattagtccttggataactatttaagcataaggcaatgagcataaggatacctggtggacaggttggagcttgctgacttgtaagcctcacaataaggtgatcaggacacctccagtcttttgcttggtgacccccgaatgtctgtgtaaaaacaactttcccctgaggattgttcactggaaaaactaatctctgtggaagtgggtatacattgctgatgttctcaggatgggaaacagggtcaaggatctcattgtgtagtgtgtaggcttgtgcccagcaccctgttttcagccctgtgcctcacccctgctaagtcaaagagtctaactcctcttgggcaggggcagtttgcattatctctgatcactgcatacaattatctctggatatatgttaagtggttcaatttcaatatagcaaagagctgttaagaaaccgaaccatttgattgatatgtgcacattgttctgagctaattttatacatgtttacttcaggatcccttattctgagagcataaaagaaatgctaacgacatttggaactgctacctacaaggtgggactaaaggttcatcccaatgaagaggatcctcgtgttcccataatgtgttggggtagctgcgcgtacaccatccaaagcataggtaagagatttacagctgtttctctataagtcacaagcattcattgatatgaattaggcatagaatcttgtttttaaatgaaatgtttgaagtgggtaacaacgtgaagaaataataaaaagacttagaagcaagaaatgtaatgtactgacaaaatactagattgatagttcataaattaaccacagcaacagagaactcttggtggtggtggttatagcttcttgtcagttgaaggaatgtactgttcgtttttactttgtaaccaaatttaattcttgtgaaatgactttgaagattctgaaacttgacaatattgtactttctgtaggattggggtttttttaacctttttaagaaaattatattaaaatatacataacataacatttaccattttaaccatctttaatctgtagaaagaattttgagtgatgaagataaaccattgtttggtcctttaccttgcagactggtaagttctcagtttattcagttcatgatagtggggcatggaaattaggtggttctgctgcttttaatcttatggacctgcagtagttacttacaccttcacttctttcgtagtaaaaacccattttctgtaaggatattaaaaagtaatgtttgtggtttaatctttcttttaaataaacttcaggaggccgggcgcagtggcccacgcctgtaatcccagcactttgggaggccgaggcaggaggatcacctgaggtcgggagtttaagaccagcctgaccaacatggagaaacctcgtctctactaaaaacacaaaattagccaggcgtggtggcgcatgcctatagtcccagctactcaggaggcagaggcaagacaatcgcttgaacccgggaggcagaggttgcggtgagctgagattgtgccattgcactccagcctgggcaacaagagtgaaactccatctcaaaaaaaaaaaaaaaaaaaaattgcagcctggcagtatagtgagacctcatctctacacaaattttaaaattggctaggagtggtggcgtggcatgtacctgtggtcccaactacttaagaggctgagttgggaagatcactggagctggggaggttgaggctgcagtgagccatgattgtgcccctgtactctaggctgtgcaacagcacaagatcctatctttaaaaaaaaaaaaaagaagaagaagaagcagaagaatgtatattctagctccactttcttgctaaccattcatatttcaactcctgcagtttggctccacttctaacactttctgacttctatgaaatatctctttccaagttcaccaaatgatctcctgattatcattttgcgtgggcattttttagcccttgtctttgaaacctctacttaattgctcattctgaaacttttatttctctccattccttcttcattctgaaactcaattttcccttaatttctgtgacactcttggctttctttctgcctctgtggctcctgcctctcagcccactctccctcctccatcctgcagttgtcatttttaaacctccagagttctgccatctaatactcttccctggtcagccccatctatgcctctgatttcagttatatccaaatgatccccacctgtgtatctccaacccagatctttatcttaggtgtaggttatctctgcctatttttttaacctggatctcctacacatacctaaaattcaatccaaattaatttttcttcctatagtccctgttttagttaatttcaccactattcatccaggagaaaccagaaaattgaagtcttttttttttgagatggagtctcactctgttgctcagactggagtgcaatggcacaatctcggcccactgcagcctctgcatcctgggttcaagcgactctcctgtctcagcctcccgagtagctgggattacaggtgcatgccaccgtgcccagctaatttttgcgtttttagtagagatggggtttcaccatgttggccaggctggtctcaaactcctgacctcaggtgatctgcccatctcggcctcccaaaatgctgagattgcaggcatgagccaccattcccggcctagatacattttttagcctgggcattcacattcagttggtcagcagagtctgacaaattctcaccattccttcttctacttgtttggttcagccccatattatttcttgcctagattatcatagcagtttttacccagaatctcactcttctctaatacgttattagaggggctcctcaaaagcaatcctgttcatattcttcatacttttacaaacttcttaacctatttctccattatcacctcctgccagttcccacccctgtggtccagacttgtagaatcactgccagttcctcaatgctagttcccatgcctttgcacattccatttcctctgcctagagtaccctaagcagactgctactctttcagatgctgttcaagctttcccttcccttagaaagccctctgaaccatgtactgtgagttagagacctctcatctgtgatgcctgcctccttccccactttcttcctttcccaccccaggactttaagctctttgagagcaggagggggagaatgggttttatttgaagatcttcagaaccaagacctagtgtatatagtaggacctcaatatttattgaaccaaacattacagaaaatttggaaaatgaaaaaacaagcaggaagaaaaaagtcatcaacttatcacatacccatctttttccattagcatatttatgcttgattacaattggtactcacatgtagctttgtttctgctgtattctttaaatcaagagttttcttattactgctacttagtcctcataacaatttttaatagctgcaggcaccctcatttgtaccaccatcttcttagacagtttccccaatatttggagtatctctttaggatactctacattttacggaagagtatccacattttagaggatctctttaggataaacataagagatatgtgttttagggtatctgtttaggataaacatagagaaatactgcatccgcatcttggcttgtttatttgttttttgagatagagtctcgctctgttttccaggctggagtgcagtggtgtgatctcagctcactgcaacctctgcctccagggttcaagtgattctccttcctcagcctctcgagtagctgggattacaggtgtgagccaccacacccggcctgcactggcatcttgggagtgtcccttgctttctgtcagatgcgtatattctatattcttttcttttccagagaaaaccagcaacatggtggcaaagagatagatttcatttattcagcacacacttagacatttcccattccatttatcctgtgttagaggcatgtcattgagatgtcatagatctagttccataccatctagagcagtttcattgtgcatccagctgtgctctgaactagcattcctgaaagagaactgctttgcatttttgttttttgttaattgcgttggtttattttaggatgactgtcttaggtcattgacgagatttgccgcagcacactggacagtggcatcagtttcagtggtgcaaggacatttttgtaaactttttgcatgtgagtattaatacatttataacatgttgtaatttttcatcctctgaaattttgtttttaatggtacagcttctctcagtaatgaattaaatatttagtagtactggttttcttatatataagctctagcttataaattctcatgtgtcttgcaagaagataaatttaaagcagattatatgcattttaacatgttggcatatgaaatatgctaatgtatttctctttaaatctgtagcactggtgcctaatgacagccatgaggaacttccatgcatattagatattgacatgtttcatttattggtgggtattgtgcagtttgtttggacttctacgtcatactatgtaactttaccttaggtttggtgagcagtgtagtggcagacaggaaggagttatgtgatttccttaccccttctgagtataattcttttatgagaaacctcaaaaagaaaatatttaggaacctagttgagagacttgacctggttatcgagacgtcctctgactcttattttgctttatggctgaggttagtattttaacctctctgtgcttttaacctgtaaagagataaaaacaccagcaacgggtcaggtgtggtgactcatgcctgtaatcccagcactttgcgaggctcaccccagatcacttgaggtcaggagtttgagagcagccttgccaacatggtgaaaccctatctctactaaaaatacaaaaaattagctgggcgtggtggcacatgcctgtaatctcagctactcaggaaagtgagacaggagaatcacttgaacccaggaggcggaggttgcagtgaccaagattgcatgactgcactccagcctggatgacagagcaagaccccatccaaaaaaaaaaaaacagcaacagaagcactgctgctggcccatacagtgcttttgtacattttcgaaaatctggcagatacagccctgtggtcacactacttagcagcagagagccccttataattcagggaaaggtatgtcctctgagccaggacatcctagtgctaagacacacagctgtccaaatagtgggtagccaaatttcagccctacctcaactgggttcccttgcacagggtacagagtgtactgccacacccagcagccccgagtgctgtgcctttattctctggacctcagattctgcccctttaagttggttagtacctactttatatgactatgtcagaactcagtgagttaatccatgtaacacacttagagcaatatattcctaataaatgcggctattactgttctcattgctgcaactaaaaccaccaccacttatactgccatgcagacagcaggaggccaacagagctagcatttgtgtacctgccagcttttacatacgttcacacttacatctctacaatttacatgtaacatattgtctttagtttaccaatagggaaactgaggcctgatcagagatattaatttgtgtaaaacagctcataagaggaggaggtaggattcatatctagatatttatgggtccaaaacccatgttttttcaactgcctacagtcctggagagagttcagatactgtttttgttaacaataagctatgtatagaggacccactggattaatgaaatcatagtgcccatcaagagtcctgtaactcaagtcatttcatgtagccagtcctattggattttccaacatggatgccctttctttaagaacaaagatttcttaaagggaggagctgaactcaggagggatcacagtaagaaaatggaaatgtgaccaggcgcggtggctcacgcctgtaatcccagcactttgggaggccgaggtgggcggattacctgaggtcaggagttcgagaccagcctggccaacgtggcaaaacctcatctctactaaaaatacaaaaagtcgggcatgatgttgcacgcctgtaatcccagctactcaggaggctgaggcaggagaatcgcttgaacccaggaggtggatgttgcagtgaaccgaggttgcgccattgcactccagcctgggcaacagagtaagactctgtctcaaaaaaaaaatcaaaataaaagtaaaagtaagaagatggaaatttgcttagctgtgaaaggaaaggcgatctgtctgatgtcctgtgtttggtgcctaggtgggcttggtgcttgcatttcctgcgttgcagtgtcaggatttttcagggatcagccttggcactggagaccttcacattttccatctggttactatggcacacatcatacagatcttacttacctcatgtacaggtaactcttgcctttttgtcagtttcttgaaggaaatacttgagttttctgagttttaaaaaaagtattagaggaaaaggtatttggatgagaataacacatgaataaggctgtttttttctgtgtatcttcatatgaaaagttttgaaacatttctttctcctcttaaaatttcctagtaatgtgaatgtttctagttttaatttcatacattcagtaatatttgtgtagaatagtaattaaatcttttagaatcttatgttttagaatgccaattttgttttaacttacatgtttgttaatgcccacatgaattcatcattaaattacgttttgcattcaaaattcttgtttttcatacactttaagactatatttatttgattttacttaaaacatgccagctggctgtttggtttgattgagatcaatactgtgctcccacttgagggattacaattttgcatgttttctaggaatacttcatgttatatgtgagtttatgaatatatttgcatgcttaatgtcttcagtccttttgataacacttaattggaaaatacagagtactagtatttccttatctttcagaagagaatggcatggatcaagaaaatcccccttgtgaagaagaatcagcagttcttgctttgtataaaacacttcaccagtatacgggaaggtgagttagttatctttacataacgcatttccctaaatattgctagatgatgatagcatgagaaaggaattcgtttgttaattaggggaatttgttgtctgttgacatgtttttaaaataagacgtggagtgatctgcagagcctttctgaactattcatatactaacataattggaaatctgggagaaaggtgataatatgcagagcttcccacatttatttggctgtggaacccttcatttgctcagggatctggcagagactagaggatagatcaaatgtactttggaaagttgatactctaaaacttatgttgtctcattcagaatgggaatttaaaactgcaagttaaattggcataatttatttttaaggtaatattcagtagtagcaggaataaaatgaaattattagaattccatgtatggttagagtcatgatttgctacaaatagcaattcagtagtttgcttagctttcaacagtatatatgtcaagaatctgtagtcaggaacctataaaaatgtctgttttttgactatcccatttctgagaacctacattaacaaaataattcaacatatagaaaaaaaacatataggcatataaagatggacactccagccaggcacggtgtctcacccctataatcccagcactttgggagaatgaggctggcagattgcttgagcccaggcatttgagaccagcctggccaacatggtgaaaccctgtctctaccaaaaaatacaaaaattagccaggcatggtagcatgtgcctgtggttctatcttctcaggaggttgaggtagtcagatcacccaggcaggtgaaggctgcagtgagccatcacaccactgcactccagactggacaaaagagtgagaccctgtctcaaaaagaaaaagatgtacactctgatattatttatattagcaaataattgaaagcaatctaagtgtttgcaggggaatagtttgatatagtgatgaatgtgttccaaaatattataaatctatttaaaatatggctcctaggagctgggtgcagtggcatgtgcctgtagtcccagctgctcaggaggctgaggtgggaggattgctggagcccagtagtttgagtccagcctggacaacttttcattttccacattttctctttatgtcactatgttacttttataaattttaataacatcacacctgtaatcccagcactttgggaggccaaggcgggcagatcacaagatcaggagatcgagaccatcctggctaacacagcgaaaccccgtctctactaaaaatacaaaaaattagccgggcgtggtggcaggcacctgtagtcccagctactcaggaggctgaggcaggagaatggcgtgaacccaggaggcagagcttgcagtgagccgagattgtgccactgcactccagcctgggcgacagagcgagactccgtctcaaaaaatttaataacagcattggaggctgtgtcaccacttacacctggcatcctataataacacacacccacttgcctgttaactcacaacttttaagcatacatgccatcagttccaaatgacagtcaagtctgttttcacactataagtacagtgaccttttcttagtagatttcccaataatcttttttttcttttttagtgccttgaaagaaataccatccggctggcatctgtggaggagtgtcagagctggaatcatgcctttcctgaagtgttctgctttattttttcattacttaaatggagttccttccccacccgacattcaaggtaatttatactttctttcaaaacgtagggagagttagtaatcctttactccagcaaatataaagatcacttgcaaaaatgaaaattgactaaaagttcaaagaatagcttattgactatggtgatgtacacatttatagcataaaatgtatgtttatgcatatgtctccatttatttggatctcagtaaatgactgttaaacttctgtgtaaatgtttttacacctgcaaagcccttctcccgtaaagatcatagttttgctttcagatgttaaaatgttcagttatgtattattcataaacaaggttcctcagatttgaaaaggtgaaaactgacaatttcaagtgatttttaacttgaaacatgcatagcattaaaatttagaatacccataattgcacataaatctgattttaatctgggaattgatttgctctttcatagttgttttccatgttctgttttgattcatttcataaaagtagtatgaatgtggacttgactgtatctctgtatcccacagtgcctggcactggccgtagagtacctgcatgcagtgctactctctgaaagtttgtccactggcatttccatttagctagttgcctaggaaccatataaaagagtttagtcttccagattatttgcagtgatgattagagttggtatttaaatctgtgtctcgtggtaaaaccatcttgtatttctgtattggttgatccttttccagagcacccatacatttttatcatttaatgttcacaataaccctgtgcagtagattgtgcaggcacaccattttgcaaatgataaagccgagacaccaggacattgggaccagtttgatgtaggagtcgcctgactgcacttgacgcattgcgtcattttccatggattccttccatgtgccattctgttaacttcctacaagttacgtacctggcaaattggaagtctttcatcctttttttttaaactctgctattgcttaactctcatgcagaatatgcccttagttgttatatgcactcttttcttgttcttcatttgcagttcctggaacaagccattttgaacatttatgtagctatctttccctaccaaacaacctcatttgcctttttcaagaaaatagtgagataatgaattcactgattgaaaggtaatgattatatacttttctttgttgtattaaatagctctatggaaccaaactttagttatcacatatgtagcaaaattctcaagtaatgaccctggtagaattcaacacaaataattcaaactataatgggtgggccttttgttgttgtttgttttgttttgttttgtttttgtttttgtttttgttttgagactgagtcttgctctgtcacccaggctggagtgcagtggcatgatcttggctcactgcaacctccacctcctgggttcaggggattctcctgcctcggcctcccaagtagctggggttacaggcatacaccaccatgcctggctagttctttgaccaccatgttggtcaggctggtctcgaactcctgacctcaaatgattcacccacctcggccttccaaagtgctgggattacaggtgtgagccaccgcacctggcctatgagtaggcctttttagctaaggatctggcttttcagtaaactttttgccaagctagtgaatagcataaacaaatttgcatggaaggggaatagtggtagaaatgttgatttctttacatgaacttacttgttaaggactctcttccataggttttttcttgtttttgtttttaagagatggggttttgccattttttccagactgcctttgaactcctgggctgagacattcctcccacctcagcctcctgagtagctgggactgcaggcacatgccatcacactcagcttttcatagatttttaaagctgaaagaacccttaaggctatctagtccaataccctcaactttatatttgagaaaagtgaagtctagagaaattggcctgtcaatcatgtcaagttagtgactgagttaaatatatggctgttctgtccacaaaacgggggaaaatatttgcaaactacatatctgataagggattaacatccagaataggccgggcacagtggctcacccctgtaatcccagcactttgggaggcagaagtgggaggatcacttgagcccagaagttcaagaccagcctggggcgggggcgcggtggctcacgcctgtaatccgcagcactttgggaggcccagacgggcggatcacgaggtcaggagatcgagaccatcctggctaacacgatgaaaccccgtctctactaaaaatacaaaaaattagccaggtgtgttggtaggtgcctgtaatcccagctactcgggaggctgaggcaggagaatggcgtgaacccgggaggcggagcttgcagtgagccgagatcatgccactgcactccagcctgggggacaaagcgagactccgtctcaaaaaaaaaaaaaaaaaaaagaaagaccagcctgggtaacatggcgaaaccccatctctacaaaaaatttaaacattaggcatgctgacatgtacctgtcaggaggctgaagtgggaggatcacttgagccctggaggtcgaggctacagtgagctgcatgccattccactccagcctggatgacagatcaagaccctgtatcaaaagaaaaaatccagactatatatatccagaattcctacaacaacaacaaaaataaaacccaattaaaaaataggtaaagggcttaaataggcatttctccaaagaagataaatagccaaaaaagcatacgaaaagatgctcaacatcactagtcactggggaaatcacactgacataccacttcacacccattaggtgagctattacttttttaaaaaaagaaaattacaaatgtttacaaggatgtggaaaaactggtatactggtatccttgtgcatgggatatagaaaatgatagagccactacggaagacagcatgacagttcctcaaaaagataaacataaagttaccttatgattcagcaattccacttctaggtacagattacaaaataactgaaagcaggaactcagatcaatattatacacccacatttatagcagcattattcatgatagccaaaaaatggaaccaactcagatgttcaacagatgaatggatgcacaaaatgtggtgtgtacacacacacaatggactattattcagtcttaaaagtaggccaggtgtggtggtgcacgcctgtagtcccagctactcgggaggctgaggcaggagaatcacttgaacctgggaggcggaggttgcagtgagccaagattacgccactgcactccagcctgagtgacagagcaagactctgtctcaaaaagaaaagtaaagaaaattctcacacatgctacaacgtggatgaaccttgaggacgtgtgctaagtgaaataagccagtcacaaaaggataaatactgtatgattccacttcactgaggtacctagagtagtcaaatttatagaaacagaaagtagaatggtggttcccaggggctgggagaaggaattttgcatttaatgagtacagagtttcagttgggaaagatgaaaatgttctggagatggatggtggtgctggttgcacaacaatatgaaggtacttaatgctacagaacattagactttgaagtggttaacatggtcatttttatgttatatatattttaccacactaaaaaaaaaaatttttttttttttaagtctcactctgtcacccaggcttgagtgcactggcacagtcacagctcatcctcctgggttcaagcactcctcctgcctcagcttcccaagtagctgcgactacaggcacatgccaccacacccagctaatttttgtatttttagtagagaagggcttttgccatattgcccaggctggtctcaaactcctgggatcaagtaatcttcccgcctcagcctccgaaagtgcagggattacaggcatgagcacctggccaaaaaagttttatttttaatatgaatgttctagctccagataatgttagcttggcattaatacaaattaatatagactagtttttctagagtatccaaattagtaagataatgatgtttatagtcacaaattgtatatatttaagcattcttgcttttagaaaatattctcctgattttaaaagttgtaggcaaaatagtatttctacaggtttcttttgatgaagtaaatatgttaggtcaagaatattattttcctcttattggctatggaggggaaaaaattctagttctaaccctttaaaagtgttttgtgtttttccccctctgtttacattaaagttggtgccgtaacagtgaagttaaaagatatctagaaggtgaaagagatgctataaggtaagttaaagagcctcaaaaactttattgaggtgggagaaagggtggaatcaggatataagtgctatattccttcagaaactgacttctcaagcctttagtgattccaaaaggttaagatatgttgccttcatattttcttcttaatctaatgagagtctatcaaagtcagaattatgaacataaatatactacattcttggcagagaaagcaaataacaaagttatattttaggatatttgctttaaaaaatataacacgtctcctaggtttttcttagctctatttttttctatctttcattatgggaaaactctccagaagtgtgaagagtaaaataatgaggctccacatacttgtcattcaccttcaataactatcagtcaaatcatggccagtcatttcttataattattttttcttcatttctttttacattctattctgattctatagtaaagtgtgctctaccagatcctaacaagatgtgtctcaattgttactatacaagttgcgcatctctaatccaaaaatctgaaatttggaatgtccccatgagcattcctttaagcatcatgttggcactcaaaaagtttcaaattatggagcatttcagatttcaggttttaacagtagagatactcaacctggattaacaattgaaatgcatttgttgttatctggtagagtatgctttactacagaatccaaacagaagtaatgcaaacattccaaactctaaaagaattcaaaacccaaagcacttctggtcccaagcatctcagataagggatactcaacccatatctcttagttctggtaaatacatcgtccataaaagtcagaagactagagattatctgtcctatttgtttgcttttacacatccagaaataacaccccaattttattagtttggaccacatgaaatgtcaatttttatcagtcaaaaatggttgaatatcacaatttcatgtgattccaccctgacgtcagaaaactcttaataaatggaacagtaatcctcaactagaagtatacatcagaataaccttgggaacttttgaaaaaatactcaggccactacctactgaatctaatttctctaaagttaaagccctagcatgtctgtcccctcaaaattcccccaagtgattttgatatgattaagaactactgtctagccgagcacattggctcacgcctgtaatcccagcattttgggaggccgaggcgggcagatcacgaggtcaggagatcaagaccatcctggctaatacggtgaaaccctgtctctactaaaaaaaaaaaaatacaaaaaattagctgggcatggtggcgggtgcctgtagtcccagctactcgggaggctgaggcaggagaatagcatgaacccgggaggcggaggttgcagtgagccaagattgcgccactgcactccagcctgggcacagagctagactccgtctcaaaaaaaaaacaaaaaacaaaaacaaaaaaaaaactgtctaaaataatccccccttcagtttaactccatttcttgtcttggcaataggtaaagtagtgaaaggccataccatgttacccgggctaggcaggtatgtgcacatggaagtgcctcatagtataatatgacctaaattaatggagtgttctttaatttttctctttttttcagatatccaagagaatctaacaaattaataaaccttccagaggattacagcagcctcattaatcaagcatccaatttctcgtaagttttgctgttagcattgaacattccctgccactggaaacacctctctacaaagaatttgaaggattttgttgttgttctttgtttgggtagagaaatcatatctgtagtcctttatgagaggagagggagaaaaaaggaaaaaaagaagaaacttggcgaggcacggtggctcacgcctgtaatcccagcactttgggaggccgaggtgggtggatcacctgaggtcaggagttccagcctggccaaacccttggtgaaaccctgtctctactaaaaatacagaattagcggggcatggtggcaggcgcctgtaatcgcagctactcgggaggctgaggcaggagaatcacttgaacctgagaggcagaggttgtagtgagccaagattgagcaattacactccagcctgggtgacaaaagcaaaactctgtctcaaaaaatgaataacatctgtagtactctatactacataacttataaaagcatcatttcactatgtttcagaataagacatggaatgggagtaggagaagcaaatttgattcatgaatgtttaataattgcacttaaagtaataacagcccttagtaatttttttttttttttgagacgagtctcgctctgttgcccaggatggagtgcagtggtgcaaccttggctcgctgcaacctccgcctcccagatgctagtgattcttgtacctcagcctcctgagtagctgggattacaggcatgcaccacaacgcccagctaattttttttttgtatttttagtatcacctcagcctcccaaagtgctgggattacaggcatgagccactacacccggcagtaatttttaatatagtatcaaatatttaacatacaagcagcataaagaataatataataggggaggctgaggtgggagtatcactcgagcccaggagatggaggctgcagttagtcatgatcgtgccactgcactctagcctgggtgacagcgagaccttgtctcaaaaaaaaaaagaagaatataataatgtaagagcttaaacattacctagacagttgaagctccccagctgtctcttctctgttgcctctttctcctccctctgaagatacctactattctaaatggaatattaagcattccattcctatacattaactatataagtttctattcttgagcagcatgtattgttattttgtatgttttttttttaattagtatttattgatcattcttgggtgtttctcggagggggggatttggcagggtcataggacaatagtggagggaaggtcagcagataaagatgtgaacaaaggtctctggttttcctaggcagaggtccctgcggccttccgcagtgtttgtgtccctgggtacttgagattagggagtggtgatgactcttaacgagcatgctgccttcaagcatctgtttaacaaagcacatcttgcaccgcccttaatccatttaacccttagtggacacagcacatgtttcagagagcacggggttgggggtaaggttatagattaacagcatcccaaggcagaagaatttttcttagtacagaacaaaatggagtctcctatgtctacttctttctacacagacacagtaacaatctgatctctctttcttttccccacatttcccccttttctattcgacaaaaccgccatcgtcatcacggcctgttgtcaatgagctgttggttgcacctcccagatggggtggcggccaggtagagaggctcctcacttcccagacggggcagccgggcagaggcgccccccacctcccggacggggcggctggccgggtgggagctgccccccacctcccggacggggcagctggccgggtaggggctgccccccacctcccggactgggcggctgctgggcggagacgctcctcacttcccagacggggcggctgccgggcggaggggctcctcacttctcagacggggcagccggtcggagacactcctcacctcccagacagggtcgcggccgggcagaggcgctcctcacatcccagacggggcggcggggcagaggcgctccccacatcccagacgatgggcggccgggcagagacgctcctcacttcctagacgggatgacggccaggaagaggggctcctcacttctcagactgggcggccgggcagagacgctcgtcacttcctagacggggtggcggccgggcagaggctgcaatctccgcactttgggaggccaaggcaggcggctgggaggtggaggttgtagcgagccgagatcgcgccactgcactccagcctgggcaacattgagcactgagtgagcaagactccctctgcaatcctggcacctcgggaggccgaggctggcagatcactcgccgtcaggagctggagaccagcccggccaacacggcgaaaccccgtctccaccaaaaaatacaaaaaccagtcaggcgtggcggcgcgcgcctgcaatcccaggcactgggcaggctgagacaggagaatcaggcagggaggttgcagtgagccaagatggcggcagtacagtccagcctcggctcggcatcagagggagactgtgcaaaggggagagggagagaagagagggagagggagagctgtatgttgtattttattttatttatttatttatttatttatttattgagacagggtctcactctgttgcccaggctggagtgcagtggtgtgatcttggctcacagcaacctccgcctcccaggttcaagtgattctccagtctcagcctccaaagtagctgggactacaggtgcacaccaccatgcctggctaatttttgtatttttagtagagacggggtttcaccatattggtcaggctggtctcaaactcctgacctcagttgatccacccacctttgcctcccaaagtgctgggattacaggcgtgagccactgcacccagccaattttgcattcattcagcattgtttctaagatttatctgtattgacgtttataactttattgatttttcattgctccatagtattttattatatggcagtggtaccgtttatctttttctcctattgatgattttatttatttttttttctccagttactgattcttttgagtgtttccagtacatggtctttgtatatatgtgcaagatgtttcctattccagattctaggaataaacttgcatagactgtaggatatacacttctttggctttacttgatattgcagaattcttttctgggctggttttttcatcactagctctttagccactctttagatcaatgacttgtgggttttttatcccttggaggtgcccgaaatcaggtggtgataagagcagagccccaactctgtgccttgtgtgcggatctctgctgtgctcccagagttactgctgccagactgaactggaaggggaggatgtaggagcctgcacagctcacacctactcctgtggctctggagtgggcatcttcctgaggtaaggacctgcaggggctttttagctttggatctgcctcagtatctgactgttagggtgtcacaggaaactactatattgccaggaattttgagactactgttccgtgtgattcattccagaaacgtggagctccttgtcgcctcacatctcacatctggtccatgccaactctgtgttggttcttttattgttaccattcccactcctcttccctcaaccataggtgacagttctgttctactttctccatgtctcccactaatgtgaaacttctctgattttctgaacaaatccagtcagaattactctttctgttatgtcctcatggcttttggattttacctccacttatacatattatcacaactctacatgccagcttgtgattagtgactactatgtaccaggcattgaggatgcagtagtccacagtgcaaagatctctgcccttatggatggagcttgttttgtatgagagagaggacaagcaagactgacaagaatttagatagtgatataggctaaggagaaaaaataaagcagggaaggggaatatgaaatggcagctatggagctaaatttgagatttaattttagtagatcagggaaggcttcctaagaacatgacttctgagtaaagacctaaagaagtgggagaacattctactcagaacattctgcacagttcctggggtagaaatgtgcctgtctgctcaaggcaaggaggcgcgtgtcactggagtgttgtgcacaggtgagagaatccaggggcctgctgtgtgctggtgacatctctgggcaaggtgtaagccatttcagggtttgaagcagaggcatgacatgagtgtgggctcctctggagcataggttgtatccatagcttagtcatccccccagtaccttgataatttcttatacgtattaggtcctcaataaatgtctgtttaattgtgctgtactattaatgccagaaaaaggcaaatgtctcaaagggatcaggggacacaaatttgactcgattcaacctatttcctagtttgtgcacaattttttaatggataacttcctcctaatagtggtttaaatatcagtactataagacttcattctatttggaactgaatacaaatgttggttactaatgtgtaaatgtgtaacgtatgactgatctctctacagagtacgggaatgtcaggtgctatttttagctggcaaaaccaaaggctgtttttattctcctccttaccttgatgactatggggagaccgaccagggactcaggtaagaacccatcctgagttagctaactcagggcctgcagcgcccttccgtatgtggtgacgtcctgagggtggagggctgaggtggttctggaagaggtggctgtgttatctgtggagtcttccaaggagggtgccctgtcagcctggtttggtgttcttttcccagccttcagaatgccatgaggaacatcaggataggtaagggaagagaataggacagagtgcaactttattccatttatcactccaaagaactgtttgaattgccatatagcatcccagctcagagcactccagggatggcccactctgacttgtatggccttgtatagaggaagcccagtgtttgagaaaatcttaattgctaacaaatgtgcttattacattaaaatctgggggacaaagatttaaaacataaagaacaatataacaatatttgaggctaagttacttctactctggtagctttagtatattgtaagctaacaattcccccaagcactattaaagaacttctttcagaccatctcttttgtctaaaggaggtataagttttaaccgccatagatatgcctgtccagccttaagtagcagatgttaaaggcctagaaacccaagcaaggtaagtagatgagctgccccaggcgctggactgcgaggctatgcccatatgccacccagtgctggtgcttcccactgttctcagcgtgggctgttaggaggaggagagtctgattagtgagtgagaggatggctgtgctcagaaacaggagcagaggtgcctggctcagggcactggtcccaggcaggaacccaccaaagcttgcacttgtgtttaaattagacctggaagttactcacatttgattgcttcactgagactgtggctgaaagattgcatctgaggaatgtttttcttttcttttcttttcttttttctttgcactcttagtaaaatctgtgaggaatatttttactcctataattcttcttttgtgttctcctctgccctcttccctttttacacgttaccaacaaaatgggcaatgaattggtagttttagcctctcaacccagaccctccttatcccccgcaacctctattccctcacctcactctgggtaagtctggtttgtgtacctttccttcctcatttcagcacttattcccttttacctgctcttggcaaagggtcagagctgatgtttttgttaatagccacagtcacctgccagacagaaatgttgcagggagtctaaaaccaataacttgtaaccttgcctaaatcaggaagggttgggttataatagaggaataaacagaacacattctgagtgacatgtgtcttctctttctagacggggaaatcctttacatttatgcaaagagcgattcaagaagattcagaagctctggcaccaacacagtgtcacagaggaaattggacatgcacaggaagccaatcagacactggttggcattgactggcaacatttataattattgcaccaccaaaaaacacaaacttggatttttttaacccagttggctttttaagaaagaaagaagttctgctgaatttggaaataaattctttatttaaactttccttcccagttttatagtttctggttctgaggactgatgaaaatcatcttccatcagcagattttcttgcactgtttgctgtgcccctcaaatataatgtcttgggttttaagatcgagcaaggagcttctcttcctagattggatcccagcccctttgtgggggtctgactgcatagtcccagccattatgtgatatttcacgttattgatgatagtgaaccgtgggtccgaagctgactcaacggaggcagggaacaaagtctctgtggtctgttgggtcatacttcctggttccactgagtggcccaacactgggactgggttggtgtcccctctgctgacaggaccctactcctaggagcaaagtggttgattttgaaggcagtgttcccttctctccattgactatgagagagttgggggacacacatgcagaagaagcccgtggggagaaggtggattcctggtgtgctggctggtttttcagggctgttagaggttttttttttttctttttttttttatggcaagacttttggctttgagaaaactcacttagagggctttccaaaaacttaggatggtctaaaaaattaggatattcttttagaattaggaagaaaaattaggatattctaaaagaatatggattaaaaatttaggatattcttttagatatcctaatatctagatgagaggccttccttcataagatctggttgtttgggctgtggttggcataagtgatatttattttggcctctgtcacatccagtttcttgagcttttaaggtaagcttcttttggctttttttcagatgttcaccaagcttaagtttaaaataataggtattctaaaagagtatcctaattttcttatctgtattcttttagaataccctaatgtttcagacagtgatattctcttgttatttctaaggctaaattggcagagtatatcatctaaagccaaacactgaagaaggtgagaacccactcccacccagccagcatttcctggaacagacaagctgctgcttccttgctggctcacttagtgcattcctgggatggtctggcacccaggctttttattctttttgatcattgttcttactgaggtgccttcctagaacaagagccacttacaaaatagcttataattattatgtaccacacaactactattgtttgatgtatgactgctgagagcttgaatacatgcagagagtgactgaagacttagtagaggaataaattctgagcctgtctaaggtggggctaaggaacagatgagtaataagaggctcttggatttttttaaccaatgcaactgaccctttcaatcagttttctttgaattacatctacaagttttgttccactcagctaccagtcaactaggcatgctccacagtatcacaggaagaaggtcagaaatctggaactgaagctaaaagaagtgaggatgtagaagccacattcctctccaaggtagtgtgtgaaagaaccgccccctcttgacaggaggatgaccgtcgccattcttgcgtgggactgactcacccagctgagaggaggaccaatagaaagaaaattcacatttgagtccacctctctccccctttttctggccttcattcataagatctggttgtttgggctgtaggtggcataattcatgtttattttggcctctgtcacatccagtttctttagcttttaaggtaagcttcttttggctttttttcatatgttcaccaagctaaaatttaaaataataagaccaggtttctctctgtacaagtggattataaacattttcaccaaatcataacaatactccagctttccggtccgacttcctaggagcctggagttagcaaaggttgtctctggatttcattctctgagaatatcacagagcctgggagaagatgaatttacatgaaattgcaacatacacacctttttattttctggtgttaagctagttgtctttcctaccttacaaatcatgttagttttatgatttgttccgcatgttttatgtttattgtagaaatgtttatataacatacgctttccatatcagggaaaatcatatctgtttaataaattggctataactttaatatctgtggacaacttgtaaaatttggaatgtatcatatgtaaaaagtttaaagatatccaaataaatgctttaggtgttggcatta

SEQ ID NO: 264 - DNA, 2071 bp, Homo sapiens
actcttgttttttaagtcacatttattgaggtatattttacaaacagattaactctttttagtgtacagttttatacattttaacaaatgcatacagttaaacaaccacaatcgagaaatagaacaattccatcttccccaaaagtcccctttgtagtcagcttcttgcctcatcctggctttcagctaccagtgtttttctctccctttgttttgtctcttcccgaatgttatataaatggaattgtatcatatgtagcattttgagtctggcttctcactaaagaagaatgcattcgggtcctccctgttcctttggattgctgagtagcattccgttgtacagacttctgggcagttgccagatgaagggcatttgggtgagtttgggtgattgttttggtgattactgctacaaacattcatggatgggtttttgtacaaacctgaattttcacttccctcaggtaaatagctagaagttgtcccttacatcttaatcctccatttgatgccatcctgagagctcagcattctctaatctgtaactttgctgtttacagtcctctgtgatggacaggataaaatgctgtcaggagttaagaactgacatgtttttccccttccagccaatctatccattgtgacctgggaaggcacttgtctcttccctggactttcatagtattggacagacacttttctcttcctaacacagtggtgctgcctgcctgcgctgtcattgagagccatctttttagccagtcgtggatgaaaagccctgtcttggtccacgattttccctggctaagctgcaaacatgctggcctagtgtaacaggtgcccggacgaggaggggcaggggagcgtgcagagcgggcacctaatcttattaacccatattaaggttactaggggtttatttactggcagctcagtcccaggcttgaagcatgttgtaaagaagctgtgggttctggaactgaggccaaaaattctaggacacagcttcccaaatattcaggatagtcatcacctgtttcttcaccgtggagtgagcattttaaaaatgaaagtcctaaggccctgtctacccccaccccatcccggggctatgctggcagaactttaaaagctagctgggccaggtggctcactcctataatcccagcactttgggaggccaaggcgggcagatcacctaaggacaggagttcgagaccagcctggccaacatggtgaaatctcatctctaataaaaatacaaaaattagccgggcgtggtggcaaacgcctgtaatcccagctagtagggaggctgaggcaggagaatcacttgaacccaggaggcggaggttgcagtgagctgagatcatgccattgcactccagcctgggcaacaagagcaaaactccatatttgaaaaaaaaaaaaaaaaagtaggctgggtccctcaggagaaaaggatttacaccagcccaaggaaagactgaagttacacacaagcaaaaacctgatagcagagacttcctgggcactggtaggtgaccaaaagggatggtccaggtttctctcgcaactaccggctacctgagaagacctgttaaaatgcagttaaccctaagcctgctccgaaccaatgagtgagatttattgtagagtcaatgcactcttggtcctctcaacaaccttcagattctcaggttgttcacatttgctcctataacctggccccatagagactcatatttccctgtttgaggaaataacgttttggccagaggagaagaaaaaatggcttggagttttgcctaaatttctacattaaaattccatgtattcagctctggttcaaactccagcaaatgctgagattatttggatataataatagtcactgttgtaatagtcaccgttcttacaggtaagagatggcaagatggagagatgtgatacccaagccatgtttataacaacgattgttaccaatgcttcccttagggtgggtttcttttcttttttggcaaatactagcggtagtaggggattctgatatatgttgttgaatggg

SEQ ID NO: 265 - DNA, 7428 bp, Homo sapiens
actgaatggtcagatgagctgaggcagaagttcctagaagggtttgatgcctttttggaattactaaaatgtatgcaggtatgtaaaaactgttacacttttctttttccttttttttttttctcttttctctttttttttttttttttaatttttctttttctttttaagagatgggggtctcactgtgttgcccagggtggagtgtagtggctagtcatagacacaaccatagtgtactatacctttgaactcctggtctctggcagttctcctgcctcagcctccaaagttgcctgggactagaggcgcaggcacgggcccaggcccagcttctttgttgttgttgttgttgttgttgttgttgttcattgaaatgaacagctttctgtctgcgcatcttttcatttcgtgcacatttccaaaagatcaatttggatggctgcaattctgaccaggaagctcctctttaattggaaattcttagaaaggtatggagcaaaggagatcccagcaaacattccggcatctactgctcttgggttttttctgtgttggttttttttgttttgttttgtttatgagatggagtctcactctgtcgcccaggctggagtgcagtggcgcaatctcagctcactgcaatctccacctccagagttcaagtgaatatcctgcctcagcctctcaaacagctggaattacaggtatacaccaccacaccagctaattttttgtatttttaatagagatagggtttcaccaagttgtccaggctggtctcgaactcctgacctcaagtgatccacccacctcaacctcccagagtgctgggattaccggcatgagccaccgcacctggccagtttttggggttgtttttttgtttgttttttgttttgttttgttttgttttgtttgagacatagtttttcactctgttgcccaggctggagtacaatggcacaatcctggctcactgcaacctccgcctcctgggttcaagtgattctctgacctcagctttttgagtagctgggattacaggcacctgccaccatgcctggctattttttgtatttttagtagagacgaggtttcaccaagttgtccaggctgatttcaaactgctgacctcaagtgatccgcccacctcggcctcccaatgtgctgggattacaggcatgagccactgcgccagccacttttatatttctttggtttccactaatgttctttctttagaggttacaagtttatttttttaatatgctttcttggaagtatagtcaagttatttgagaaactgtagtggtttttgattttgctttttaatgtttccatgtttctttttctctccttcatgtggtatttatataatacagtgtagacctttttcccctgtttaattctctttttaggaaacatccctatatacaaaacagaatctagaagtagaaacgaacaggtatatttaaccagttataactgtaagaagataggtgacgtctctaaaaatctgagcaagtactattatgatttctttagtagccacctggctttcttaagaaaaggaatgaccaaagttgacttaccatttttatttttatttgtttgaatttatttttatttatttatttattttggaggtggaggtttgctctatcgcccaggcgggagtgcagtggcgcgatcttggctcactgcaacctctgcctcccaggttcaagcaattcttctgcctcagcctcccgagtagctgggattacaggtgcacgccaccacacctagctcatttttgtattgttagtagagacagggtttcgccatgttggccaggctggtcttgaattcctgacctcaagtgatccacccgcctcggcctcccaaagtgctgggattacaggcgtgggccaccatgtctggcctgacttaccattctagttcctaggttgggtggtagttcatgggtgtttattataatactactatgtttttcatgtatctgtgaaaacaatagctactttggtcatttttgatacttgaagtattctgtattctctattgtttaataagttctgacatactagaatagttaggctagtttctgaacagtaattttaattaaaagctatttattgttttgccttctttcaggctctgtgaaaacttctaattgcatattaggacataatattaaaactttattataaaatacagttataaattcaataacattttaaaagcttgtcacatttcttttaacaattttttctatagaccatagagctaaaaaggaaggattattgcagtgaaatattgaagtattttattgcctaaaacagatcttagatgatacctctgaaataatgtgtttattgggatttctaaatttatattttagagaatgttatataaacacataattttaaaagctattatttctcatagtacttgaagtttcctgttaaaacttataccttctatgtttttataatcaatatatatttctcctacattacttcttaggtttccatataaaagaacaactattattttcattcatatataattttttcacttccgttaagggaatggatccaattacacgtcaagtaggacaacatattgaaatggaaccagagtgggaagcagccttcacactacaaatgaaattaacacatgtcatttcaatgatgcaggactggtgtgcttcagatgtgagtttcttctgggtgcggggaataggaggaaagtggaagagggaggaataagcagaatcctaagtaaatttcaaggagatctggagaaaatagtggtgatacttagttcattaaacagcgtattttccttctccacctataaactcagtaaaattttaaaattctacagcctgaggaaaaacttgaaaaatagagaaagaaataatccagattgtctcttccctaatgtaactatctttgttttttttccataatcccttctagactttgaggatataaaaatggtagtttctaaatttattcaaaaataaagttttattattggtacatttgtcctgtgtcttaaaattattttggccttcctttggcgataaagtctagatgagagcctgtatacattatgaggttagggaggtttctgtaaggtctgaacaatctgtaaaagttaatggaacaatgagtaaatgatattcctgactgagaagacagctgcattatagtctgtgatgacagggactagggtagtcctaggagctatagaaaggtctgtggttggagcacagaagtagagaacagagatttgggcacaggagtgatttttcggggccttggccatggttgtttttttttttgttttttttttttttgagacacagcttactctgttgcccaggccagagtgcagtggtgcaatcccggctcactgcagcctcaacctccctgggcttaggtgatcctcccacctcagcctcccaagtagctgggacaacaggcacacaccaccacacctggctaatttttctattttttgtagagacagggcttcgccgtgttacccaggctggtcttgaattcctgggctcaagcgatctgcttgcctcggcctcccaaagtcttggaattaccagcgtgagccaccacactcagcctgcattttatttgaattgaagtgggaagcctttagagattaccatctctctattaaattccctgcttcaactcttgccccctttatccattttccatacagtgacatgattcaatttacatgttttttaaaattgctctgtatggagaatggatgaagggggcaagagtcaaagcaggaatttaatagagagacgcttggcaatgccttggagttactagagatagagaaaagtagcaagttttgagagaaacttagaagatgaagttgccagcttggtaatagattggacaatggggaatgggggaaaggagggtattggaataacttctagatttctgcactatatgagtaaatgtatcattcactgagatgagggacactggaagagggaccaaatttgggagggaggattgagtttggttttgcctatattgttatttgaggtacttactcactgaatttaaggtgcttattcaatgttgtaaaaactcaaccttttgagtaacttacagaaaaaccctcttttttaggaaaaagtgttaatcgaagcttacaagaaatgtctcgctgtactgatgcagtgtcatggtggttatactgatggtgaacagccaatcacactaagcatttgtggacattcagtggaaactatcagatactgtgtttcccaagaaaaagttagcattcacctcccagtttctcgcttacttgcaggtaaagcatttcccctaaaataaaaccctaaaattatcttttaaattgttgtttgtggttaatatctgtgaatacttactttgtgccagatgttattctgtgatttctacatcattaacttatccaatcatcacatcgtcctgtgaagtaggtattattattaagcttgcttcatagatgggaagacagaggcatagagagtgacttgcttagtaagtcacacaacaagaaagaatcagttggcattatgaggaagtttggcaccagaggccatgtttatagccgttataccatagtgcttctttagacaactacagataccacgttttatcatttcatcgaatccagcttcaaagtctatgttgttaccattcaaattaatctgtcacttaagcaattgctaatcatttgaagccaccctaggttttctattctcctttttttcctctccctctgagctgtttcatatatttattgatagctttttacgcaacaggtcaagaacaaggacataatggggtgataatcttttaatttcaagtagttgatttacaagccacttgtaattaattggtagaatgtctgaagctgccatcttatgtggccaaagactttgaatatgcacttatccatctctgcagactcatttcagtacagctttcatatttcttgattctaggtattcttttcttgctcgcacactgttgttttctttagttccgttttaactcagagaacagaaagaaattttgaaggtatttttactcattgtaaaatatgtagtttatgttaagtttgtggctcagtagcttaatgtgatgtgagggtatgttttttgttttgttttgtttttttctggaggagattgtagagagtttgtttcatttcttccttaaatgtttgacagaattcaccagtgaagtcatctcatctgatgctttaggttttggaaggttattaataattgactcaatttctttaatagatacgggcctgtttaggttatctttttctccttgtgtgagttttggtagtctgtgtctttcagggaattgatccatttcatctaagttatcagatttgtgggcctagagttgttaatattccttcattatccttttaatgtacatggggtcagtagtaatgattcctctttcattctgaaggcattttttttcattgttctgagacctatcacattatcccactgatagacccttgccatgggtatattattgaagtcatggtaatttaagataattacttactctgaggcttataaagttgttattcctagacatatgaatatcaaatggtacaatagaccattacctagaatgaaatcatgatcgtaagaagaaatctctcttatttctataacttgttcaggcccagttttgtttttataagtgttttgagcaactgaactgtcaatcctcaacacaggcaattgatggcatggtgttgtggaaaagtattggacagaaggcaagaaagtgaggcatgcgtgtggaagtagcacgcaggcgcagcgtggcatgccctgcacgtgcccttaaaaaaaaaaaaggcaagaaattgagtaatgagtcctgtctccaactgagccactgatctcttctgcctttaaaaatcagagtgagactctgtctcaaaaaaaaaaagtctaattttatgggaggaagctgatgctgatagttatctacagtgaaaaaagtcagtgctctaaaaatgtactaatttctgcctaggtttttacctccctcaaagctgtcgtgtgaatatttttgagtattcatttcatggtatttcataaaccttagcctaactgcttataatctaattggaaatctaagtaaaccaacacaaaacagttcatggacagtttgaagcaagtgctaatggagtttgtaaatgttgagcatttacaacatttacaaatggagcagtaaatgttgagaataagctattagaatggcattagtagtgcaagttttcctagatgaagaaagcctcaaaccaggcttgagtaaatggccattatatattgataagactttaaagggtgtcctctgtttaagcaatagcataaacaacacattcagaatgaactgaaggctgggcgtggtggctcatgcctgtaatcccagcactttgggaggccgaggccagcagatcacctgaggtcaggagttcgagaccagcctggccaacatggcaaaaccccgtctctactaaaaataaaaaaattagctgggcatggtggagtgcacctgtagtcccagctgctctgctcaggaggctgaggcaggagaatcgcttgaacctgggaggcagaggttgcagtcagccaagatcccttgaggttagaaactaatgaggctttgatcctaaaccaaaagttctggggaacttaattcaaaggtcagtatcagtaaggaccgtgaattccagggccagtttttccgatcagtggccagaaggatctctcactgctatactttaaatgggaacaaattccatggcccagtgaaatacaactcttaaagctggcataacatgtatataaattgttttgatagcttttaaaatgtcattggtgtgtattagtacatacaactaagactagttctaagtgtgcctttgataacagattcatgagaagcattaaaaagcctcttttattagccgggtgtggtggcgggtgcctgtggtcccagctactcgggaggctgaggcaggagaatggcgtgaacccgggaggcggagcttgcagtgatccaagatcgcgccactgcactccagccgggtgacagagcgagactccgtctcaaaaaattaataataataataagcctcttatgaatatagatcattttctatcttaattggtaatttgataggttcccaaagagaaaagaagttagatataaagttgagtgaatatttagggtatttttcctaaatgatttttactgatagaaatactgttttttgtttgttctttcatgcaggtttacatgtattattaagcaaaagtgaagtggcatataaatttcc

SEQ ID NO: 266 - DNA, 1857 bp, Homo sapiens
gcagacgtggtagaaagacagtaagagaggaacaactagaagtggagcccgaagatgtgactgaactgctgcaatctcatgataagacttgaatggatgaagagttacttaagtggtttcatgagatggaatctactgctggtgaagttgctgtgaacattgttgaaatgacagcaaaggatttagaatattacataaacttggttgggcagagtttgagaggattgactccaattttgaaagaagttctgctgcgggtaaaatgctgtcacacagcatcacatgctacagagaaatctttcatgaagagtcaatcaatgagacaaacttcattgttgtcttatttcaataaattggcacagccactctagccttcagcaaccactgatcactcagttcagcagccatcaacatcaagacaagaccctctaccagcaaaatgattacaacttgctgaagggctcaggtgatcattagcgttttttagcaataaagtatttttagatataatgctattacatgcataatagactagagtacagtatagtgtaaacctaccttttatgtacactggggaaccaaaaaattgtgtaacttgctttattgtgatacttgctttattgtggtagtctggaacagatcctgcagtatccccaaggtatgcctgtatctcagtatagtcgtgatcataggtcttgcttttctttagattcactgttggtgttatcatccatgaatttcaccttcctgtgtacaaacatctcttattacagtaggagaatatgggagtcagaaaaggaagacatttattgtcattatgaactcagaaatatgttttctagtgatcattgaaacaactgagattgatattttccagccacggcagttttggtgattgaaagcaagatctgttttttaaaaattaaatataagtttgcacattcttccagggaagggcacgggataatttcccttgccattttattttgaaaccagctttgttgtggtggcacgctccatgagatttgctccatgagatttgctccatgttgcaccacacacagtctttgctcctgtgtccttccatagaaaaaaacagtgtggggaaggatttggtttgtcttaccctttaatcttctgctcctacagctctctggtctgatagttcactattttggtaataaagtcagatatagttcaaatcctgtctggtctattatttcgtgaaatttttgaacttttccatgctttggcatcctccaagaactttttcctttctaagttttactgttttaatataaatggactcctatgtgaacacttttagactggagtctaaaagtggcctaataggcttgctatttttagagaaggagaaagttgccttttgttctctctgtgcttttcacctcccacatgttctttagagttttttttcctgttctggtcttagtagtgacagctttctaattccagaggctttttcctgggtctgtttctggctcattttgtctcatactcaaaatttttaatgtcagaattgggctgggctcttctctttctattatctgtaaacattttgggtttcttttcctctaatttatgaaaattatgaaatgtacacataaaggagtggaaaatatattcacccagtttaaagaagagtaataaaatggacattcgtatatacccaccatccaggttgagaaatagaacattgcttgtgtctcagaagctctctgtgttcctctcagtcacgttcccccaccccaactcctacccaaggtaacctctcatcctgaagcttacatggaagatttgggcatttttattaaaaaaaaaaaaaagaaagaaaaa

SEQ ID NO: 267 - DNA, 4243 bp, Homo sapiens
gaagatgatgagaagcttattgaggaaatccagaaggaggctgaagaggaacagaaaagaaagaatggaggcaagtgcccctccccaggcccccaggacagagcagcagccaggccatgcaggcttctgctggcctccctgagtgtcctggcactcaacccagcacaggagaggagggggtgctgtccctcaggtggctatagacctgacttcacccacgcggccacatctcaggcttatggaaaggccttcaacgccttgaatatagttttggcatctccttgatggtgaggaagtcccaaggggtgggtttgagctcaggaatcaatcaagccacacctggctaaagaaaagtagacccagctgatccttctgaggctgaaaagcagtgaagccaggtgtgttggcacacatctgcgatcccagctcctcaggaggcagaggtgggagcatcactggatcccaggaggttggggctagcctgggcaaaatagcaagaccccatctgtttttctttaaaaaaaagaggctaagtgcagtggctcacatctgcaatcccagcactcgggagggtgaggcaggtggatcagttgagcccaggagtttgagaccagcccgggcaacatggcaaaaccccatctattaaaaaaaaaaaaaaaagtaactgagtcactgaggtggcccatcaaggccctggctctgaaggatgtctggctgggtgggtggacgtgccaccttccaaggtgccactgtggagcaagacactggtggaagtacagatttgttcttggtttcttgcagtggcatttgggaggtgtccacgttttgtgctttgatcagcatgtggagccactcccgtgtccagaggtcgctgccctggtcccaggctagattccattgaggttggtttaatgtttttctccactaatccccacatccctttcagagaacaccttcaaacgcattggacccccgctggagaagcctgtggagaaggtgcagagggtggaggccctcccgaggcccgttccgcagaacctgccacagccacagatgccaccctatgccttcgcgcacccacccttccccctgcctcccgtgcggcctgtgttcaacaacttcccactcaacatggggcctatcccagccccgtacgtgccccctctgcccaacgtgcgggtcaactatgacttcggtcccatccacatgcccctggagcacaacctgcccatgcactttggcccccagccgcggcatcgcttctgatggccccgaatccccattgagcagcacaaagcccgtttggggtaggagtgtggatggagaaccctcccccaaggctggtgtctgtaccattgcatcctaagtcagcttgaagggtaggctggttttcttcccacccctttcctagaagggctactgctcctggaagagtggacggatccataataaagacgtcccaaatggtggagttcggagagagctgcgatgtgaactgcccctcccctcgcatcccccaggccaccaacggcagtccttctgccttgtccatggcataggccatagaccaggtccctgctgctcacacctgggcctctcctcggagccgacccctgggtagcaaggcagccgagagcatctccctggaggggcccacggttgggccaagggcagagggggctgcacctgcgggcctgggaagcattgctcagggtggggggctgggaccatggcccgcagaggcactgccacagctgtgagggccaagatgctgtccccccatccaaaacccgtgcgccactgcagtgagtgttgagggcacctctcctcccctcttacacctactcagatgaggcagcagcagacccatctcgcggcgggggttttgttctgttgccgcctaactttctcatcctcggtctctggaaagtcaggctgagaaatcctttcccaggccaggccgctgcggtacactggatggttctgaagctggcccattgaaagagcctcttaaggcagctgggacagaggcctggtggccctgctgggcagcccaactgctgggggagacgtttctgccaccctgggtgatgagcagcttttcccccctggctttctgggggaggagtgggcctccttagggagacaggtgaccctgggtgccacccctgccccgtgtgtgccccgggtgttctcagtggttgctgaaggcaggtagagggtgctgtccagtatcccccatgtgaaggtcacttcccttctcatggagtcagctgagcatcagctcagccctgccatgtccccactcaccctcctcgcctcctgtccggccctgggtttctagcggtgcctgaggcatcactctggcccattgacagatgagaggtctgaagccttcctggccacaggcatcactttctcctcctcctcatgccctgccttgtccttgtcgtgttgccatggggttctgagaggctgggagttcacagacctcagacacagctgagtccgacaaccattggggtggggctgcatcagtctccggagtggcccgccacctcctgaagcagggcctggcccacccaaggtgcctggggcaggcgggcaccgtcattcgctgccattggcttctcagatgtatttcaaggactaaagtgggctctaagatctaagatggcccggcgcggtggctcccgcctgtaatcccagcactttgggaggccgaggcgggcggatgagttgaggtcgggagtttgagtccccgtctctactaaaaatacaaaattagccggacaaggtggcgcatgcctataatcccaggtactcaggaggctgaggcaggagaatcacttgaacctgggaggcagaggttgcagtgagccaagattgtgccactgcactccagcctgagcaacaaaagcaaaactctatctttaaaaaaaaaaaaaaaaaaactaagatacccattctttctgcctttgcccaggatggaggctttgaagacaggtggtcacctggacctggggtaagggtgcgcagggaggccgggcttgggggcagcctgctgctatgtccttgctggcgcccatacctgttggactgcctgaactttgctactagcctgaacgacagtgccttggaaaggcaggctccatgcggcagcaacaggattgtcttcggtaccttaaatatgctccctgtgcttccccagggaggatctctgggagcagagggcggctgtagacatcacagctgaagaggtgacctcaggccctgggagcctcagctccctctgccctgtaccctaggcacgtggctccagcaagagccccaggcaggacaaagggagcaggcagcagctgcagaaacagccctagacaggtgctggcctcaaccctggcaggggagggggagcccagagtgatgtttctcctaaggccaaaccccaggggtgggtcatttgagaggagttccagctgttctggccacactgggctggtggggaaggagcggcggcctctttccttggagggtccctgattcctgaggatcctccccgagccaggcacgggggaccacagggctgccgtgagcacccaccctggttctccaggcccctctgtccagaggcagggcctgaacctcgggctcctgcctggaccagtgacagcattggggagagaagcactgggggtcttcagaccagccagcaaggggccgtgccagtgcccagagagcaggtcagacaacaggcaaccctgaggcagctggctccctctctctgccctgcagggcttgccgcagggcgtgaggctccccagccacagccccctcttacttgccttaaaactggagagaggaatctagtatttgcacttagcaaaatatttaaaaactgaaaaaaatgtgcatgatctgtcactttgtataaaaacaagaaacgattagttcattaaactttttctttaccttctggtagtaaaaatagataaaataattccgtttcaactactgtgtgtaaaaagcctgtatcatatgtaactgggacttttgtaaataaatgtttgtgcgctctgctccctccagcttcgtctctccaccccgccatccggcaagttacaggggccgccgacagattcgtccaagtgattgggtctaaaccagcatcctcacctccccgactgggtcctggcaggagcaggcccggaaggcccagtagtaagatccccaccactcccctgcc

SEQ ID NO: 268 - DNA, 3461 bp, Homo sapiens
tggtttcttgcagtggcatttgggaggtgtccacgttttgtgctttgatcagcatgtggagccactcccgtgtccagaggtcgctgccctggtcccaggctagattccattgaggttggtttaatgtttttctccactaatccccacatccctttcagagaacaccttcaaacgcattggacccccgctggagaagcctgtggagaaggtgcagagggtggaggccctcccgaggcccgttccgcagaacctgccacagccacagatgccaccctatgccttcgcgcacccacccttccccctgcctcccgtgcggcctgtgttcaacaacttcccactcaacatggggcctatcccagccccgtacgtgccccctctgcccaacgtgcgggtcaactatgacttcggtcccatccacatgcccctggagcacaacctgcccatgcactttggcccccagccgcggcatcgcttctgatggccccgaatccccattgagcagcacaaagcccgtttggggtaggagtgtggatggagaaccctcccccaaggctggtgtctgtaccattgcatcctaagtcagcttgaagggtaggctggttttcttcccacccctttcctagaagggctactgctcctggaagagtggacggatccataataaagacgtcccaaatggtggagttcggagagagctgcgatgtgaactgcccctcccctcgcatcccccaggccaccaacggcagtccttctgccttgtccatggcataggccatagaccaggtccctgctgctcacacctgggcctctcctcggagccgacccctgggtagcaaggcagccgagagcatctccctggaggggcccacggttgggccaagggcagagggggctgcacctgcgggcctgggaagcattgctcagggtggggggctgggaccatggcccgcagaggcactgccacagctgtgagggccaagatgctgtccccccatccaaaacccgtgcgccactgcagtgagtgttgagggcacctctcctcccctcttacacctactcagatgaggcagcagcagacccatctcgcggcgggggttttgttctgttgccgcctaactttctcatcctcggtctctggaaagtcaggctgagaaatcctttcccaggccaggccgctgcggtacactggatggttctgaagctggcccattgaaagagcctcttaaggcagctgggacagaggcctggtgcgcctgctgggcagcccaactgctgggggagacgtttctgccaccctgggtgatgagcagcttttcccccctggctttctggaggaggagtgggcctccttagggagacaggtgaccctgggtgccacccctgccccgtgtgtgccccgggtgttctcagtggttgctgaaggcaggtagagggtgctgtccagtatcccccatgtgaaggtcacttcccttctcatggagtcagctgagcatcagctcagccctgccatgtccccactcaccctcctcgcctcctgtccggccctgggtttctagccgtgcctgaggcatcactctggcccattgacagatgagaggtctgaagccttcctggccacaggcatcactttctcctcctcctcatgccctgccttgtccttgtcgtgttgccatggggttctgagaggctgggagttcacagacctcagacacagctgagtccgacaaccattggggtggggctgcatcagtctccggagtggcccgccacctcctgaagcagggcctggcccacccaaggtgcctggggcaggcgggcaccgtcattcgctgccattggcttctcagatgtatttcaaggactaaagtgggctctaagatctaagatggcccggcgcggtggctcccgcctgtaatcccagcactttgggaggccgaggcaggcggatgagttgaggtcgggagtttgagtccccgtctctactaaaaatacaaaattagccggacaaggtggcgcatgcctataatcccaggtgctcaggaggctgaggcaggagaatcacttgaacctgggaggcagaggttgcagtgagccaagattgtgccactgcactccagcctgagcaacaaaagcaaaactctatctttaaaaaaaaaaaaaaaaaaaaaaagatctaagatacccattctttctgcctttgcccaggatggaggctttgaagacaggtggtcacctggacctggggtaagggtgcgcagggaggccgggcttgggggcagcctgctgctacgtccttgctggcgcccatacctgttggactgcctgaactttgctactagcctgaacgacagtgccttggaaaggcaggctccatgcggcagcaacaggattgtcttcggtaccttaaatatgctccctgtgcttccccagggaggatctctgggagcagagggcggctgtagacatcacagctgaagaggtgacctcaggccctgggagcctcagctccctctgccctgtaccctaggcacgtggctccagcaagagccccaggcaggacaaagggagcaggcagcagctgcagaaacagccctagacaggtgctggcctcaaccctggcaggggagggggagcccagagtgatgtttctcctaaggccaaaccccaggggtgggtcatttgagaggagttccagctgttctggccacactgggctggtggggaaggagcggcggcctctttccttggagggtccctgattcctgaggatcctccccgagccaggcacgggggaccacagggctgccgtgagcacccaccctggttctccaggcccctctgtccagaggcagggcctgaacctcgggctcctgcctggaccagtgacagcattggggagagaagcactgggggtcttctgaccagccagcaaggggccgtgccagtgcccagagagcaggtcagacaacaggcaaccctgaggcagctggctccctctctctgccctgcagggcttgcgcagggcgtgaggctccccagccacagccccctcttacttgccttaaaactggagagaggaatctagtatttgcacttagcaaaatatttaaaaactgaaaaaaatgtgcatgatctgtcactttgtataaaaacaagaaacgattagttcattaaactttttctttaccttctggtagtaaaaatagataaaataattccgtttcaactactgtgtgtaaaaagcctgtatcatatgtaactgggacttttgtaaataaatgtttgtgcgctctgctccctccagcttcgtctctccaccccgccatccggcaagttacaggggccgccgacagattcgtccaagtgattgggtctaaaccagcatcctcacctccccgactgggtcctggcaggagcaggcccggaaggcccagtagtaagatccccaccactcccctgcc

SEQ ID NO: 269 - DNA, 344 bp, Homo sapiens
tttcaggctgtgcccactcagacccagccctctccaaacccttctcatatccaccacttgcacgcagctcagtgcatggaggccctccatccccccacctcaccaggcagctgcctgccatgctcagacccctctgcccagccttgtggatggcctccttgtggaacgccatcaggctgatgaaggaaggaggccttcggggaaataggaaggaacggtgtgcagcccaggccccactggccagcagcaggcttcgggcttgttccatggccataagcaacaagcggcctcctcactgtcccacggggcctcagcactgcatgaagctacaggttcatccttct

SEQ ID NO: 270 - DNA, 195 bp, Homo sapiens
ccaagttcaagcgatcctcctgcctcagcctcccgagtagctgggattacaggcgtgtaccaccacgcctggctaattttttgtacctttagtagagacagggtttcaccatgttggcgaggctggtctcaaactcctgaccttgtgatctgcccgtctcggcctcccaaagtgctgggattacaggcgtgaggc

SEQ ID NO: 271 - DNA, 3484 bp, Homo sapiens
cataacaactctgttctttcctcctggcaggtgacagagctgaatgagccactgtcgaatgaggaacgaaaccttctgtctgtggcctacaagaacgttgtgggggcacgccgctcttcctggagggtcatcagtagcattgagcagaagacatctgcagacggcaatgagaagaagattgagatggtccgtgcgtaccgggagaagatagagaaggagttggaggctgtgtgccaggatgtgctgagcctgctggataactacctgatcaagaattgcagcgagacccagtacgagagcaaagtgttctacctgaagatgaaaggggactactaccgctacctggctgaagtggccaccggagagaaaagggcgacggtggtggagtcctccgagaaggcctacagcgaagcccacgagatcagcaaagagcacatgcagcccacccaccccatccgattaggcctggctcttaactactccgtcttctactatgagatccagaacgccccagagcaagcgtgccacttggccaagaccgcgttcgacgacgccatcgccgagcttgacaccctcaacgaggactcctacaaggactccacgctcatcatgcagctcctccgcgacaacctcacgctctggacgagcgaccagcaggacgacgatggcggcgaaggcaacaattaaggccccaggggaactggcagcgcacgcggatgctactactgcagtctttatttttttcccatgagttgggggtcgggtgggggagggaaagggagggatgaccttcccagggagaaacccacgacctgtcctgtctttgatcgcctctttgacatttttgccaaaataccactagtggaaagtcaggctagctgtgctggtattggaatagcagcctcacactggcgtctggactgttctgtagattcatgcaagtggagctgtctgtctctaatttaacttattgctagataatagggttttcagatgaaaagaaaacttaaagaggaatggccctcattcagtaagttctgtggttccagtaaggatttttatgtacatacgctctcgtctctcgttttgggtactttctatctcatctgtctcggctctgcatgttttccagggtgtagcctacagacatggaacagtgtaaatcccagactgacagacttagaacctgaggtctcattcatccttatggtttaggccttgccagttttccgaagtctctgattagttgacagtattaacactaaattgcagtttacagtatttctacattacagccatatgtaacatcaagccatcgattgtgtacttttcctttgctagttgtttgggctttaacatccttattcagccttatccaggttggttttgctgttgatcggtctcctaggctaaatgagaatgaaagcgacttcaggtcaggtggctgtgggattttttttttttggtccttctttcctcttaacgtaaatccaccaccaaaattattaatcctcttgagagaaacgtgaaacgccacaaaaatagagaaaattcaggtctgtatgtcatggatcgtgttggtattttcagagaacatcccgcttctgaagctgctgcagctccctcctcagggatcacactgccgtcacccactctgcactggggcgtttcctactgcgcctcgtgctggcggacgcagctgggtgcagaagctgtggggtcggagaggcgtttggagaaggtctgtggtgcagtgtgtgaaaattcaggtgctagaagcctactggtagaaaaacccaaaaggaagagctatatccttaaccattctgtccaatttcgggagccttgtcagtgtgtcagtttttcctccccgaagacactccttccccaagtaattgtaggaagataaaaaaactgttaccagataacaaacactgaactcctatttgaccagaactttttcctctcgagatagttttttctttttaatgaaaaaagcataggaattggagattggcttgtctcacgcagccagtgcacatttggaattgacggaaacaacgttgctatttccacccatttgttttcggcagccttaaggccctcattctcatttcgggtgaatctgtctatctgtgaacgtggcccgcatgtgcattcttttttttatatatataaagtcagtgacgaggaactcccgagacgtgtaatgacaccacacttgttttctttgtttctttgttttatttaggcaagaagaggtgtgagtaattgaggaaaaactgacagatgcttttgctaataccaaaattgagcttacaattaggaactgagtatgtgtaacaggatacaggtgacagtgaagatagaagaaccacgatgaccacagactcaatgtgctctgtaacatcgcacagtttacccagcatgactttccttaggaggccccctcctcacgctagagtaaaagtcccagttaagtgaagcctaccagaagaactagtagaagaagctttgccgcttttgtgcctctcacaggcgcctaaagtcattgccatgggaggaagacgatttggggggggaggggggggggggcagggtaggtggggctttccctaatttatcttcatgtccagtgagcagtgttgcgtttttccttgtagcatttggaaatgatttactggaattacaaaacctatttttcctttaaatttcagctttggctctggctgctttttagaataatgcaagataaaaatcacacctgagggctgaaaacggagagggaatgggagacttgatatttaagcagcttgaatggtttttcttttctttatttttaaagaaatgcacttgcctatgatactgtctctccagtgaaatgattactcctccattactctattgatacaatattgtgcatgctagtgttgtatttctatacagtagcttgaaattgattaacttatactgtaggtgttatgtattcctatgacaaaaaaaattaagtcttcaaattttttaaaggttttttttttttaatttaatttttccttttgggggtaaagtttgctctaccaaatagtgattgtaacaaattgatctgttttggatgttgctatagtgacatgcagttatatattttgtttttaaaagggggggagcaaaagaaacaccagtgttagcttaatcttaatgtctggtgtttgtcatggtgaaattataactattacagtgttggagaacaacaaatatgttctctgaatgagcctttgtgctttttgtcatgttatgcagtgaactatttttaaggtctaatcagtgattatttttccagctccgtgtttctctaaggaattatttcacacacggaccatctttagcagtttcctcagtgatggaatatcatgaatgtgagtcattatgtagctgtcgtacattgagcaaataaacttacagatctgacgccagtgctccttagctt

SEQ ID NO: 272 - DNA, 1218 bp, Homo sapiens
catcatgccattgcactccagcctgggcaacagagtgagaccaggtctttttgaaactctgtctccaaaaaaaaaaaaaaaagaaatcagccatgcatggtggtgcacacctgtagtcccaggtactctggagattgaggtgggaggattgcttgagcccagtagtttgaggctgcagtgaggtgtgatcatgcctctgcacttcagcttgggaaacagagtaagaccatgtctcaaaaagaacaaaaaaagactttcttatttgtctgatatacctgtatattaccttatgaaagaagcagaaatccccattttgcagataagaaaaccaaagcccagagaaatgaagcggcttgtccccaagattgcttagcgaatgatggagctgggaaaagcccaatcttccgttatttgtggacacatcagaattcagcatgagtgacagcggtctgctggatgacagatcgtcagtgcagaatgagacacgaggtgcctgtgtttattcatgcaggaggagtgtttgcagaagtgccgggaacaagaggtggtggagcaaagcatctctttcctggtttccttctgctctgaactcaagtagtacccaccccctattcttcccctcttttgagtctgtttcactgagggcacggctggtaggagtaacgttgtccagcattaaaacagagcatcagtaatgtctaggaaaatgttaactttaacaacaccactaatcagtttagagaatatttgagcgtgtagcacttgctgatcattcattcagaaaatgaattgcctgccataaactaataagcatgatttggtttatgttttgatttaattatctctgagtagatgctgcttgaagtaatgactgtaatcacttttgccaagcataccccccgtttataatttaagaaaaaaaatttttttttttttgagatggggccttgttatgttggccaggctggtcttgaactcctggcctcaagcagtcctccccacctggtgtctcaaagcactgggattacaggcatgggccaacatactgaacataatgattcaaacatagaaaaaaaagtctcctggtagttcagttcccccatgccccaggagtttagtacaggggtgtccagtcttttggcttccctgggccacattcccttgggccacacataaaatacactaacactaacaatagttgatgagctaaaaaaaaaa

SEQ ID NO: 273 - DNA, 158 bp, Homo sapiens
ggcatggtgctgggtgtctgtaggaccagctactcgggaggctgaggcaggagaatcacttgagcccaagaggtggaggttgcagtgagccaagattgcaccactgccttccagcctgggcaacagagtgagactccgtctccaaaaaaaaaaaaaaa

SEQ ID NO: 274 - DNA, 9872 bp, Homo sapiens
ccggcccggcgcccgatttccgccttccgacccagctgtgggctgcgccccacgccagcccgcgccccgcatggctgccgccggggccaggcctgtggagctgggcttcgccgagtcggcgccggcgtggcgactgcgcagcgagcagttccccagcaaggtgggcgggcggccggcatggctgggcgcggccgggctgccggggccccaggccctggcctgcgagctgtgcggccgcccgctctccttcctgctgcaggtgtatgcgccgctgcctggccgcccggacgccttccaccgctgcatcttcctcttctgctgccgcgagcagccgtgctgtgccggcctgcgaggtgagccgccaaacggggtcgggacggggccatgcctccgacgcgtgcgcggcgttaattccgggagcgaccagggggacggcggcaagcaccgctgccgccccagcctcagagctccctctccgcgctgccccaggagcaccttctcccgggcccttccaggatgtgctcatttttgctacataagcttctaactgtgcccacgcgcattggtaacccccagcttttaatcagtgggtaccaggtatggtgttaattcagataatagaaattgtcttggaaagatggatcccagtagctttttcgtatttttggcagtcgttcttaacgatcagtcttattaatttgattaactcaaaccacctctaggaggcaactcagttgcgtgtaccggacgaaatctagtttctggattttaaaagcttattcctgaaagcaaaaactttcatttcttttttgttgttgttattttcagttttacgtgcagaggataaaatatgtgaattgctgttttgtttgaagataaaacttttctctgtattcttttttagtttttaggaatcaactacccaggaaaaacgatttttactcatatgagccaccttctgagaatcctcccccagaaacaggagaatcagtgtgtctccagcttaagtctggtgctcatctctgcagggtttgtggctgtttaggccccaaaacgtgctccagatgccacaaagcatattactgcagcaaggagcatcagaccctagactggagattgggacataagcaggcttgtgcacaaccaggtgggtaatcttttttttaagtctcagttcagtttcatcgcctttgtcaacccagatatttccaggacaactttaaaggtaaaattaggaaaggtatagtactttaaaatttttcatgcctggaacacctttgtaaaaaaaaaaaaaaggctgtgaagtctgaatcactgaataatgtcaccatataggcatttaatttatgaccctttatctaaaatgccagaactatagggaatatagtactttagagacagcaaattattagactgtcttcaaaactaaatgattactaatagtgctgtcctttttgtttcagatcatctggaccatataattccagaccacaacttcctttttccagaatttgaaattgtaatagaaacagaagatgagattatgcctgaggttgtggaaaaggaagattactcagagattatagggagcatgggtaagcagtttcaggacttcattcattaagtggttaaacataatacttggaagaaagggctccatgtgcctagaagagaggtactgagaggaagactcactttggaggctgtagcatacaattttcagatattgcctcaggtaaaaatatacttcctggactttgttttctgacacataagaggtgtgttctgctccctgtaaagacaagggtgggtatccagatggtcccatgagtagggctgcacaagatgctggaggcttggtaagttcctctgggtcgcagatcggtttctcgggtcgggatagtgtgagtgcctagcacagtgtcgggcacgcagaagggccccttaaaagtttctctttcatctggccagttttagatacacaattttgtcagtttacttacagtgcatactcttgggtagtacttgtgctgaccaagtatcttagaggcttattttattatagtagccaacatttatccagcacttaccttatataaagggctgtttgtgcatgagctcattaaaatcgtgacagcagaccaatgagtgagaaactgccccattttgaaggtgaggaaattgaggttctgggtataactttctttggtcacataatattaaattttacaatttgagccttgagccatacacaaaaccaccacaaaattagatttatagactcaaaatgaaaacatcagcttactggtttgtagttcataccagtcatacattccaaaacatgttttgagtcttactctgtgcctgaccttgtgcttgataacagggatataatgggaagcaacactccagtggtcagatgctcacagtcttatggaggagcccaaataatatctggggaagttaaagtccatataatgactgataagagtacaatacaggtgccatgggaacacgtgacatcactgaagactgcctggaaggggccgcgcgtgtgttcatgcctatacgataaacatgatacataatgaaaatgcttatctttaggagaaaggagagcctagagtagcaggatcaaggatgaaagctggacttcaaatatgccttgttagtgtaaatgtgactgtggaactgtatgagtattttaagattatggagtaaagtaagttttaaaaagcagtccctaatcatcaaaagtaaaaaactcttgatgtagtcatataaccacactaagaactcttccaggtgacttcaaaacataggacagtacatctctagtagaatatgccctgagaatgaaaagaatgtaacagtgttagtattttgaataaacatgttattactagactgttgcttttattttgagatggttgtgtgtgtattggggggaaaggaaacgagtaattatgttggtgttactgagaactgagatgttgggcgtaggaggaagataatgttgattgtgtctacgtaccatttctctctaaaaggaactccaggctctttggagaggtggttgattccagaactaggtcaggaaacgttcatataatgtgggaacatggtcatatcaaagattaaggataaggattactagggccatgtcagaactcaagcaacatgaaaaggctcctgcttgcaaaagatggacagtttgaacatccacaaggacgctaactgcatcagatatgtttaatgggttcaaaatgatactttaaaaaaactcagtaatcatctttataggatacttgggaacagactcattttcaaattggtaaataaaaggaaagagtttgccttcgaggggtacataacttaattatgaatgaagtgatatgtgtggaatttacttcagagtaatggaggtggaagtggcagagaaaggaaacactggacttgatagtgttgaaactgattaatgatatgtggcggttcattatagtatttccacttttctgtatgtccaaaattttctaaaataaaaggagaattgaatagaaaaatgcttcctggaggtagctgtgtcttacctgagacttggcaggaggcagtagggcctgagggaacagcatttacagtgtcctaacggttatactgaaactttccacgtatacttgatggaacatcaatctgaaggcatcctacacttcctccatcagacctgatggtgcaagtgaacaccatcagtgcctttccagtttcatcaaagcagttattttagcttctctgacccaaggtatatcagttctattttaacgtacattacaaagactaatggttatacttagagacacgggtctgttggggacagcagtggcttagggtggctgtaatcccaggaaggaatgtggagaaggaaatgaacatttttttttttgagacggagtctcactctgtcgcccaggctggagtgcaatgtcaccatctcggttcactgcagcctctgcctcccaggttcaagtgactctcctgcctcagcctcccgagtagctgggattacaggcacctaccaccacgtctggctaatttttatatttttagtagatacgggatttcaccatgttggccaggctggtcttgaactcctgacctcaggtgatctgcccgcctcggcctcccaaagtactgggattacaggcgtgagccactgctccaggccagaaatgaacacttgatgactgagtgagtgagcctaccagctgaggatactaatgataagggctcacatttgttgggtgtcctgtgatgtgctgggcagtcctaagcccttgaccattctgttattttgaagctttaaggagatgcactaaatggaagtccatataatagagttggatggagtacctggaaattcagatggtccaacttgaatgagtgaataaatagggaaagctatctgattaaaagtgggtcccctctccatgtgtgaattgtcaagttgtggggattactcctgtttttcataatagttacgttgatttttcaggtgaagcacttgaggaagaactggattccatggcaaaacatgaatccagggaagataaaatttttcagaagtttaaaactcagatagcccttgaaccagaacaggtaaagtggagctcatagctcctcatcgtgttctcttcaggccatgttttatgagtataatctgtaagaaataacttcatagtaacattagtctgttccttaggagcctataaaagcaggcttttgttatcttgttagaggagttcctcacacagatgggccatgtagaaaggtgttttgcagtgctgatccatttaatagttactaaaagactaaaggttatactgtttatcatacagggttcattttctaaagcaagcatcagggatgggagatgaatgagatgttgcctaaggtacatgaggtttaggcaccattggcccccccgccagaaagaaaaaaggttatttttgcccatttccaacaggtaactttggcttgtaaaatgtgacatgttaacatttttctccttaacctcccctaccataaacgtaaatcacgaaagaaaactaaactcccataaaccagtcactggttcaaataaatacacaggaagaatagatctaggtcttaaacactaaggcagtttttagcaatgcatatgcttttagacaaaatacagaaaaccactcagttgctgtaggaagcttattacagtgaaatttacttatgtttgtagtagttttcaaaacactatgtttcacttggtatttgtccctcctaaaattttttaactatgaaggtaggcacagactctgggcagaattctgcaattagagcagaggctcattcttagtcccttcacaatatattcataggattaagttgccaacattaggtagtaaaagcatcatctgggagatatattttgatgccctctgagtcagataaactgaaataatcactttgaggtgattgagaaggcattagtggcacactggtacagccaggtctgatgggggaactgtgacatgccttttgggtcagtgctacatcaagagtaggaacattcatggagtagatagcatgttaccattggcaacttataggtaaggtattgattatttgaacatgatcttcattgattttagattcttagatatggcagaggtattgcccccatctggatttctggtgaaaatattcctcaagaaaaggatattccagattgcccctgtggtgccaagagaatattggaattccaggtatgaccttaaataaggaccatttagtgtgtaatcaccatgattgtttttaaacattaaaaacttcaccaaggtaatttgtgcacatgggtcaacatggcagtatggaagggtaccctataatgaaaatcatcagtttcctgcctcaccttggggctagttccctggaaggaactgtcttgtttttttctgtttcctagttttcagacacggtctattgactgacttctgtgacaatgaggatatctacactgctctccacctccagtgtggttatgtcattattattagtgcctctgttaacttttgttattttaaataatgtataccttcctttcttgttctagtaattaaagtctttgactatatactttatgagaggagtctttactgtttaatcttggtttgtggatttgttagaaaaaatggatataagcattaaagataaatgtccttccctgcccaaaaggatttgttagcatcaaaatccatttgggtagggtggaaatgctcttgagctatggattcactaaccttaccaaagtcatagctaatattggtttgtttctttgggtaaaaaaggaattatgaggaccatacacaaaactctgcttggttcttagtgccaaagctctcaatgtccaaattgaggtgacaggatttgtataaagtgattccatatcaggtggctattctgcctattcactctttgagttagactacttctaagattcctctctggtctctataactacattgatagatgtcctttctgtattcattactagtaattagtgtttcttgagtcaagagtaacaacatctgcaatgatacaaagtaaaagttgcccaaatagaagcctcagcccttttgagtggcatattagtaatgaaaataattcattaacagccacttgtgaacttctttctcaaatggaaaagaccaaacagaaggtgagaggggctttgaagtcataaggaagttttagattgttaaacatgttaattgtataatgtctataatcctgctttgtagtatgaggattgaaagaccaagatccctataatcatcctggctgagaaggtctcgtgctccctgctgtgaagcagctttctaactgtgtgtcaccctcttctcaggtcatgcctcagctcctaaactacctgaaggctgacagactgggcaagagcattgactggggcatcctggctgtcttcacctgtgctgagagctgcagcttgggtactggctatacagaagaatttgtgtggaagcaggatgtaacagatacaccgtaaaggcatcttaaagccttgaaaaatgttaataatcttttataccttgcaattccatttctgggattttatcctaaggaaatacttataccaaaaatagaggtgcagagatgttgacagattgcttacacagtgtctacttattagtgaaacaaaagtgtccagtgacagggaattaaataaattttggtacatccacagaggaaggctacacagtcttaattataacacctatattgacaacagacataccattataggtggtattcatggtatgatcctattcttgtaaaaatatttgtatgtatgcacagaaatctgcaaagatgtacacttagtgaactggttaccaacgaatggtgggactaactaaaatggtctttttacttatatgtgcatttctttttataataaaaatgggttatatgcctaatgaagtcaaaccatctcactctgagcatttcccaccctaggtttttaaaacacaaaaatacttaggtaaaactcccaacaaacttgtctgatcattagctgattatcacaggctctagtatgtactggaagcccagaatatttgagaaataccaaacctcaggttggtgagtatgatgaacaggaaacccagtaattctgaagcagcagtatcacagttggcaggatgaggaacaacagtggctttgtgatcacagaactggaatttaaagaggctggaccttcagaactgatcttggtcagccagcggccctgcttacagatgagacactgaaaggcaaaaggcgatggtcttccctttccgtgtcagcattgtatacaggttccctatcgcacatacaagggttatggaatgtaagccaaaataagggtctggcctaggaggcagcagcctgaggaaaggaaggccctgaagtcagttttcaaagggctgacccttggcctattatgtttctgatacatctgtttaagcaagcggctcctaagactacactaaggtttcttccatcccctagcagctcacagttgacaattcccagttctctcagcaccagtgatgcctgcccttaagacacattgctgttgatcagtgcttgaatactgacggctaattctgataaatttctcaggcttatttccttaatctacattggctcacattgtcccctaacacatccctgttaactgaaatgcattgccaccataaatcctcacgttttcataggtaacatcacttgctaatgtaattgtctacttggctattttatttgtaatttaaaaagttctgtcctagtagtccatattatataagtatacatatgcaatttgtattaattgtataagatagttatacatagcaccatatgggaaactgcagtatggagtttctcccatggggaggttatcagctacttaagagctagaggatactagtttcgaacctgggatggctaaatctatgaaaatcacctataactatggtgtcacagccctgtggctactggagtaagttgtcatcaactagtgacaagagctggtcgcaacacttagtaggaagcacagtggcataaggaaacctggactagtggggcctttatatctaaaattatgtattattccttataggcagaatctgtaagtacgttatgactgctaatgacttttaaagcaaacatgttaacgatctttctatggtaaaaactgttatttggggacatcaccagatgatgtggacattcttgcaggtattttggcatacccaggcaagctgtcattggtgtatattccagttaacctctggagatgatcgtaacagtttacagggcctttccatttgggatggatatatcaagagggagacaaactggtccaaatcaccagaaagaaaatctcacagcaccgacttggcatctgtgttaaaaaatagcaactatatttaaaataaactgtacaacataaaaaatttaaattaaaaaatgcattaagcaagttgcctttagaaatgtgaagacattttaaaacactacaagataatgagcaagtctcacctacataatcatggctccacagacggtgccagtccatgcatccaccatttctcaacacctacaaagttttaagatctgcttggttcagatactgtccagccacagcagctccctctgctgtagagagcagcatattcagctttgcctttttatttcagatactgaatatcctttggcaatttcagatatcacagcaaaaaaaaaaaaagttccaagtgtttttggcaatcatattggtgatagtgtttttgttactcttaagaatgttatggtggaggtgggaggatggcttgagcctaagagttcaagaacagcctgggcaacagttgagtgactttgtctctacaaaaattaaaaaaaattagctgggtgtgttggtgtgcacccgtagtcctggctagctactccagaggctgaggtggatcacttgagcccaggagtttgagactgcagcaaaccatgattgtgccactgcactccagcctgggcaacagagaccgtgtctcaaaaaaaattgcacatataacagataaagtaatgataaagtaaatacgtaaagtaaatgagtaattatgggacattctaattcctcatcccctatgtctttaagaattaaaaattctcagtgtagaaggaagagtgtaatacagaattggttaaataaaaaccctataagctttgaatttgaattggatatacaattggtaaaataaccctatgagctttgaattggacatattaat

SEQ ID NO: 275 - DNA, 9878 bp, Homo sapiens
ccggcccggcgcccgatttccgccttccgacccagctgtgggctgcgccccacgccagcccgcgccccgcatggctgccgccggggccaggcctgtggagctgggcttcgccgagtcggcgccggcgtggcgactgcgcagcgagcagttccccagcaaggtgggcgggcggccggcatggctgggcgcggccgggctgccggggccccagccctggcctgcgagctgtgggccgcccgctctccttcctgctgcaggtgtatgcgccgctgcctggccgcccggacgccttccaccgctgcatcttcctcttctgctgccgcgagcagccgtgctgtgccggcctgcgaggtgagccgccaaacggggtcggaacggggccatgcctccgacgcgtgcgcggcgttaattccgggagcgaccagggggacggcggcaagcaccgctgccgccccagcctcagagctccctctccgcgctgccccaggagcaccttctcccgggcccttccaggatgtgctcatttttgctacataagcttctaactgtgcccacgcgcattggtaacccccagcttttaatcagtgggtaccaggtatggtgttaattcagataatagaaattgtcttggaaagatggatcccagtagctttttcgtatttttggcagtcgttcttaacgatcagtcttattaatttgattaactcaaaccacctctaggaggcaactcagttgcgtgtaccggacgaaatctagtttctggattttaaaagcttattcctgaaagcaaaaactttcatttcttttttgttgttgttgagtattttcagttttacgtgcagaggataaaatatgtgaattgctgttttgtttgaagataaaacttttttctgcattcttttttagtttttaggaatcaactacccaggaaaaacgatttttactcatatgagccaccttctgagaatcctcccccagaaacaggagaatcagtgtgtctccagcttaagtctggtgctcatctctgcagggtttgtggctgtttaggccccaaaacgtgctccagatgccacaaagcatattactgcagcaaggagcatcagaccctagactggagattgggacataagcaggcttgtgcacaaccaggtgggtaatcttttttttaagtctcagttcagtttcatcgcctttgtcaacccagatatttccaggacaactttaaaggtaaaattaggaaaggtatagtactttaaaaatttttcatgcctggaacacctttgtaaaaaaaaaaaaaaggctgtgaagtctgaatcactgaataatgtcaccatataggcatttaatttatgaccctttatctaaaatgccagaactatagggaatatagtactttagagacagcaaattattagactgtcttcaaaactaaatgattactaatagtgctgtcctttttgtttcagatcatctggaccatataattccagaccacaacttcctttttccagaatttgaaattgtaatagaaacagaagatgagattatgcctgaggttgtggaaaaggaagattactcagagattatagggagcatgggtaagcagtttcaggacttcattcattaagtggttaaacataatgcttggaagaaagggctccatgtgcctagaagagaggtactgagaggaagactcactttggaggctgtagcatacaattttcagatattgcctcaggtaaaaatatacttcctggactttgttttctgacacataagaggtgtgttctgctccctgtaaagacaagggtgggtatccagatggtcccatgagtagggctgcacaagatgctggaggcttggtaagttcctctgggtcgcagatctgtttctcgggtcgggatagtgtgagtgcctagcacagtgtcgggcacgcagaagggccccttaaaagtttctctttcatctggccagttttagatacacaattttgtcagtttacttacagtgcatactcttgggtagtacttgtgctgaccaagtatcttagaggcttattttattatagtagccaacatttatccagcacttaccttatataaagggctgtttgtgcatgagctcattaaaatcgtgacagcagaccaatgagtgagaaactgccccattttgaaggtgaggaaattgaggttctgggtataactttctttggtcacataatattaaattttacaatttgagccttgagcaatacacaaaaccaccacaaaattagatttatagactcaaaatgaaaacatcagcttactggtttgtagttcataccagtcatacattccaaaacatgttttgagtcttactctgtgcctgaccttgtgcttgataacagggatataatgggaagcaacactccagtggtcagatgctcacagtcttatggaggagcccaaataatatctggggaagttaaagtccatataatgactgataagagtacaatacaggtgccatgggaacacgtgacatcactgaagactgcctggaaggggccgcgcgtgtgttcatgcctatacgataaacatgatacataatgaaaatgcttatctttaggagaaaggagagcctagagtagcaggatcaaggatgaaagctggacttcaaatatgccttgttagtgtaaatgtgactgtggaactgtatgagtattttaagattatggagtaaagtaagttttaaaaagcagtccctaatcatcaaaagtaaaaaactcttgatgtagtcatataaccacactaagaactcttccaggtgacttcaaaacataggacagtacatctctagtagaatatgccctgagaatgaaaagaatgtaacagtgttagtattttgaataaacatgttattactagactgttgcttttattttgagatggttgtgtgtgtattggggggaaaggaaacgagtaattatgttggtgttactgagaactgagatgttgggcgtaggaggaagataatgttgattgtgtctacgtaccatttctctctaaaaggaactccaggctctttggagaggtggttgattccagaactaggtcaggaaacgttcatataatgtgggaacatggtcatatcaaagattaaggataaggattactagggccatgtcagaactcaagcaacatgaaaaggctcctgcttgcaaaagatggacagtttgaacatccacaaggacgctaactgcatcagatatgtttaatgggttcaaaatgatactttaaaaaaactcagtaatcatctttataggatacttgggaacagactcattttcaaattggtaaataaaaggaaagagtttaccttcgaggggtacataacttaattatgaatgaagtgatatgtgtggaatttacttcagagtaatggaggtggaagtggcagagaaaggaaacactggacttgatagtgttgaaactgattaatgatatgtggcggttcattatagtatttccacttttctgtatgtccaaaattttctaaaataaaaggagaattgaatagaaaaatgcttcctggaggtagctgtgtcttacctgagacttggcaggaggcagtagggcctgagggaacagcatttacagtgtcctaacggttatactgaaactttccacgtatacttgatggaacatcaatctgaaggcatcctacacttcctccatcagacctgatggtgcaagtgaacaccatcagtgcctttccagtttcatcaaagcagttattttagcttctctgacccaaggtatatcagttctattttaacgtacattacaaagactaatggttatacttagagacacgggtctgttggggacagcagtggcttagggtggctgtaatcccaggaaggaatgtggagaaggaaatgaacatttttttttttgagacggagtctcactctgtcgcccaggctggagtgcaatgtcaccatctcggttcactgcagcctctgcctcccaggttcaagtgactctcctgcctcagcctcccgagtagctgggattacaggcacctaccaccatgtctggctaatttttatatttttagtagatacgggatttcaccatgttggccaggctggtcttgaactcctgacctcaggtgatctgcccgcctcggcctcccaaagtactgggattacaggcgtgagccactgctccaggccagaaatgaacacttgatgactgagtgagtgagcctaccagctgaggatactaatgataagggctcacatttgttgggtgtcctgtgatgtgctgggcagtcctaagcccttgaccattctgttattttgaagctttaaggagatgcactaaatggaagtccatataatagagttggatggagtacctggaaattcagatggtccaacttgaatgagtgaataaatagggaaagctatctgattaaaagtgggtcccctctccatgtgtgaattgtcaagttgtggggattactcctgtttttcataatagttacgttgatttttcaggtgaagcacttgaggaagaactggattccatggcaaaacatgaatccagggaagataaaatttttcagaagtttaaaactcagatagcccttgaaccagaacaggtaaagtggagctcatagctcctcatcgtgttctcttcaggccatgttttatgagtataatctgtaagaaataacttcatagtaacattagtctgttccttaggagcctataaaagcaggcttttgttatcttgttagaggagttcctcacacagatgggccatgtagaaaggtgttttgcagtgctgatccatttaatagttactaaaagactaaaggttatactgtttatcatacagggttcattttctaaagcaagcatcagggatgggagatgaatgagatgttgcctaaggtacatgaggtttaggcaccattggcccccccgccagaaagaaaaaaggttatttttgcccatttccaacaggtaactttggcttgtaaaatgtgacatgttaacatttttctccttaacctcccctaccataaacgtaaatcacgaaagaaaactaaactcccataaaccagtcactggttcaaataaatacacaggaagaatagatctaggtcttaaacactaaggcagtttttagcaatgcatatgcttttagacaaaatacagaaaaccactcagttgctgtaggaagcttattacagtgaaatttacttatgtttgtagtagttttcaaaacactatgtttcacttggtatttgtccctcctaaaattttttaactatgaaggtaggcacagactctgggcagaattctgcaattagagcagaggccattcttagtcccttcacaatatattcataggattaagttgccaacattaggtagtaaaagcatcatctgggagatatattttgatgccctctgagtcagataaactgaaataatcactttgaggtgattgagaaggcattagtggcacactggcacagccaggtctgatgggggaactgtgacatgccttttgggtcagtgctacatcaagagtaggaacattcatggagtagatagcatgttaccattggcaacttataggtaaggtattgattatttgaacatgatcttcattgattttagattcttagatatggcagaggtattgcccccatctggatttctggtgaaaatattcctcaagaaaaggatattccagattgcccctgtggtgccaagagaatattggaattccaggtatgaccttaaataaggaccatttagtgtgtaatcaccatgattgtttttaaatattaaaaacttcaccaaggtaatttgtgcacatgggtcaacatggcagtatggaagggtaccctataatgaaaatcatcagtttcctgcctcaccttggggctagttccctggaaggaactgtcttgtttttttctgtttcctagttttcagacacggtctattgactgacttctgtgacaatgaggatatctacagtgctctccacctccagtgtggttatgtcattattattagtgcctctgttaacttttgttattttaaataatgtataccttcctttcttgttctagtaattaaagtctttgactatatactttatgagaggagtctttactgtttaatcttggtttgtggatttgttagaaaaaatggatataagcattaaagataaatgtccttccctgcccaaaaggatttgttagcatcaaaatccatttgggtagggtggaaatgctcttgagctatggattcactaaccttaccaaagtcatagctaatattggtttgtttctttgggtaaaaaaggaattatgaggaccatacacaaaactctgcttggttcttagtgccaaagctctcaatgtccaaattgaggtgacaggatttgtataaagtgattccatatcagggtggctattctgcctattcactctttgagtcagactacttctaagattcctctctggtctctataactacattgatagatgtcctttctgtattcattactagtaattagtgtttcttgagtcaagagtaacaacatctgcaatgatacaaagtaaaagttgcccaaatagaagcctcagcccttttgagtggcatattagtaatgaaaataattcattaacagccacttgtgaacttctttctcaaatggaaaagaccaaacagaaggtgagaggggctttgaagtcataaggaagttttagattgttaaacatgttaattgtataatgtctataatcctgctttgtagtatgaggattgaaagaccaagatccctataatcatcctggctgagaaggtctcgtgctccctgctgtgaagcagctttctaactgtgtgtcaccctcttctcaggtcatgcctcagctcctaaactacctgaaggctgacagactgggcaagagcattgactggggcatcctggctgtcttcacctgtgctgagagctgcagcttgggtactggctatacagaagaatttgtgtggaagcaggatgtaacagatacaccgtaaaggcatcttaaagccttgaaaaatgttaataatcttttataccttgcaattccatttctgggattttatcctaaggaaatacttataccaaaaatagaggtgcagagatgttgacggattgcttacacagtgtctacttattagtgaaacaaaagtgtccagtgacagggaattaaataaattttggtacatccacagaggaaggctacacagtcttaattataacacctatattgacaacagacataccattataggtggtattcatggtatgatcctattcttgtaaaaatatttgtatgtatgcacagaaatctgcaaagatgtacacttagtgaactggttaccaacgaatggtgggactaactaaaatggtctttttacttatatgtgcatttctttttataataaaaatgggttatatgcctaatgaagtcaaaccatctcactctgagcatttcccaccctaggtttttaaaacacaaaaatacttaggtaaaactcccaacaaacttgtctgatcattagctgattatcacaggctctagtatgtactggaagcccagaatatttgagaaataccaaacctcaggttggtgagtatgatgaacaggaaacccagtaattctgaagcagcagtatcacagttggcaggatgaggaacaacagtggctttgtgatcacagaactggaatttaaagaggctggaccttcagaactgatcttggtcagccggcggccctgcttacagatgagacactgaaaggcaaaaggcgatggtcttccctttccgtgtcagcattgtatacaggttccctatcgcacatacaagggttatggaatgtaagccaaaataagggtctggcctaggaggcagcagcctgaggaaaggaaggccctgaagtcagttttcaaagggctgacccttggcctattatgtttctgatacatctgtttaagcaagcggctcctaagactacactaaggtttcttccatcccctagcagctcacagttgacaattcccagttctctcagcaccagtgatgcctgcccttaagacacattgctgttgatcagtgcttgaatactgacggctaattctgataaatttctcaggcttatttccttaatctacattggctcacattgtcccctaacacatccctgttaactgaaatgcattgccaccataaatcctcacgttttcataggtaacatcacttgctaatgtaattgtctacttggctattttatttgtaatttaaaaagttctgtcctagtagtccatattatataagtatacatatgcaatttgtattaattgtataagatagttatacatagcaccatatgggaaactgcagtatggagtttctcccatggggaggttatcagctacttaagagctagaggatactagtttcgaacctgggatggctaaatctatgaaaatcacctataactatggtgtcacagccctgtggctactggagtaagttgtcatcaactagtgacaagagctggtcgcaacacttagtaggaagcacagtggcataaggaaacctggactagtggggcctttatatctaaaattatgtattattccttataggcagaatctgtaagtacgttatgactgctaatgacttttaaagcaaacatgttaacgatctttctatggtaaaaactgttatttggggacatcaccagatgatgtggacattcttgcaggtattttggcatacccaggcaagctgtcattggtgtatattccagttaacctctggagatgatcgtaacagtttacagggcctttccatttgggatggatatatcaagagggagacaaactggtccaaatcaccagaaagaaaatctcacagcaccgacttggcatctgtgttaaaaaatagcaactatatttaaaataaactgtacaacataaaaaatttaaattaaaaaatgcattaagcaagttgcctttagaaatgtgaagacattttaaaacactacaagataatgagcaagtctcacctacataatcatggctccacagacggtgccagtccatgcatccaccatttctcaacacctacaaagttttaagatctgcttggttcagatactgtccagccacagcagctccctctgctgtagagagcagcatattcagctttgcctttttatttcagatactgaatatcctttggcaatttcagatatcacagcaaaaaaaaaaaaagttccaagtgtttttggcaatcatattggtgatagtgtttttgttactcttaagaatgttatggtggaggtgggaggatggcttgagcctaagagttcaagaacagcctgggcaacagttgagtgactttgtctctacaaaaattaaaaaaaattagctgggtgtgttggtgtgcacccgtagtcctggctagctactccagaggctgaggtggatcacttgagcccaggagtttgagactgcagcaaaccatgattgtgccactgcactccagcctgggcaacagagaccgtgtctcaaaaaaaattgcacatataacagataaagtaatgataaagtaaatacgtaaagtaaatgagtaattatgggacattctaattcctcatcccctatgtctttaagaattaaaaattctcagtgtagaaggaagagtgtaatacagaattggttaaataaaaaccctataagctttgaatttgaattggatatacaattggtaaaataaaaaccctatgagctttgaattggacatattaat

SEQ ID NO: 276 - DNA, 426 bp, Homo sapiens
cattaaagccactgtagtagccaagggaaagcttcctttttgtcctctgaaggttcactgaaaagtcaactgacaaaaggcacattaattggagaaagggcatacaaatttattaacatgcacatgggggagaaccagagtgattttgctgaagccccaaatggggttcagaaacttatataccatcttgaggttacagaatgggggtttggattgtggcataacaggttatgcgggtggagacctggctgacaaccacggtcttgttatgtaaatgaaacctcctaagtagaactccttaaagagaacaggtggtacatgtttctttcagacctttgcaaaccaacagtaaaattctaaaccctccaaccgactgatggaccctctgcttgcccaagggcattctgaagttaacctgaaaaacta

SEQ ID NO: 277 - DNA, 18491 bp, Homo sapiens
ctaacacttttataaactgcatttattgtacagagtactctgaagaaagaaaaaaatatgtacagccattcattttcattaacacatatattctgtcctgcaatactggagaggtggaatgtgtctggcacagaaataacccctaggagttataaattagaaaaacaacacttttaaaaaagatttttacttttctggtagaaatataaaaactgtggttcatggggaaaaacattaaaattaaaaagtccaatcaattatagaggtggctttaacacttaaagttttctccctcaaaccaacttgtcaacagcagtgtttaaaatctacatataaataaatgggcagcgctgcccagatagcagcacggtatgagcaactcacagtcacgctgcgcggtgttctcagtgcacaaataatgccccttcccggcatcccgcggtgggcacttacagaagggcatcacctggtgccacaccctgcaactcaacatccatcttctcacaacaccaccatttaaaggtaccaaaacaaactgatttgtttaaaaaaaaaaaaagaagggggtgggggaggcaagggtacatgagagccattacgtcgtcttcctgaatccctttagaatagggtagatgttttcaaatgcttcataaatttctgctctgactttagcacctaagaagacaagttggagtagagatgagagactgaaatggcacttcttaacatattaagatggtaaaattcttaccttaaagctgcaagcacaattctcaccatacccagtcagattaaggcacaggcatgaaaacattaatagtggaatcccttgtcacaatcttatttttgtttataaaacaatacttttaaaaaatcatcttagtgactccagcgtctcattctatagctcaagaggcatgtattcacacttctctccttggtcctgaaccaggccataaaccaagcaggacggcaatgataacaactgaatcttcttctctgaattgctgccttcaactagactcatttctgaatcttcctttcttgtctcataatcatattgctgaggaatcctaaagcttcagataactaattccaagtgaaaacgccatcttttgttcaatgcaatgctcacctcctcactgtaaatggaagtctgcttgcagagctgtggtcagacttccctgctctcactgtgcctttagtgggcacgtttctcatcagactttgggtgggaggcctttgtacaagaagctagcccactgtccgaacactgaaatttcttttcagcactgagaaaatgccatactcaaaacacttacaaactttcagatactacttcctgttacaacttacctgttaatacaacttttccagaaacaaaaataaggagaacaattctgggtttgatcattctgtagattaaaccaggaaataactctggctcataactagaaggaaaattgcaaaaagtttagaaatcaagagctttgtgtgcttttagataaaatgaggacctgtacaaggaaaaatactgaataaacaaactagtcaagaggtaaaacacagttcttcaagcagcatcaaaggatagaatagaataattaaagcaagtgaggccgacttgtagtcgtcagttgataaccactggatggaaggctatttgtcctcctatcactttaccctatttctattgaatctggattttctgatttaagaaaaagagccctgtagttatgtctgcagtctctatatcattagatataatgatatctaatgcagataataatcctttacttttacagtcctaataattactattacagtcctaataatcatttacttctaagatccaatactgacagtttaacttttaatcatatcttacctccttaaattgaaatattctctagctgacaattgtggtcaggaaatttaatcaaacttatatactagcctgagaattaacctatacctgattaagctgtctgactgaatggactattggtatatattctttttttttttgagacggagtcttgctgtgtcgcccaggctggagtacagtggcacgatcttggctcactgcaacctccatctcctgggttcgaatgattgtcctgcctcagcctcccatgtaactgggattacaggcatgcaccaccatgtccagctaatttttgtatttttagtaaagacgaggtttcaccatgttggccaggctggtcttgaactcctgaactcaactgatctgcctgcctcggcctcccaaaatgctgggattacaggtgtgagccaccaggccaggcctggtacatattcttctaagcctagtaatctcatttttctcagttcggagagactgaaaacaggatgcctctgtttctgtgtgtctgacctaagacaaaattcaggacaggcttctctgaggaagagtggaatgggtagacatatggaactcaagtgggagcttcctaggtgaaaagggaaatgagcatactaggcataaaagtggcaagtgcaaaggcctagggcaggaggaaccaagtgagccccaggggcacacagaactaatgtgcctgtgaacagacaccagaagaccatgagatgaagcagtgaggtgggcagggctgcctgcctgtgagtcttcacctgcaagtagcagggaagataattagaaagttgttcctatcgctcaacttcacactttgctggtagatctgacacaatgttgactaaaagagaagatccaaactgggaaaaaaaattgatacaaggttagggtcaattcatgcattccaagtgtattcagcaataaaacgataaaacatacagaagtagaatcaaattcattccagtaaaggggagttatgggtaccgcaaagtgataagggaagcagaggctggtgagggtgataaatatgactgagaacatcaggaagacaatgcaagaatacatacaactataaccatgtcaactgttctcatatactgaatattttgcatgtgttttattctgaacaatgtttagattataaatgaactgttgccaataacaatcataatacatttcagacttacctactaaattgttggtgggtgagcacaaggccttctaaccttataggaaacttcacatcacagctccccaccatattctgaatcttgaagtccaagaacttagctggaaaacccaacttctgtacaactctagcatattttcttgctgccagtctggactgttcttcactagggaaaggaaaaaagtgagttattcatactcagagccagctaaaatacttatttagactaataacttataaaaagtccaaaacagtaaactaataaagtgtaaactggtcagccttcttgcaataggagaaaagactgacaggcattcacaattccttataaagtattcctggatccttgacagaaaactgtaggcctgccaaaatgacctttcaatccgccaaattattgtagccctagattttatggatgtgaattatcaccatcatcagtcatcactatttctgtattttagcccatgcatttctactgagaggaaaactaacaaacttcattttgatcagaaaatgttgatgagatttattattgaacaatgtattcactaattctatcctcttttataccaagactcatcatgaatagacattcctatgtcatttgttgaataaactacgacttagcagttcagagcttacataagaaaagcagaatgtgggccaggcatggtggctcacgcctctaatcccaagcactttgggaggccaaggcggatagctcacctgaggtcaagagttcgagaccagcttggtcaacatggtgaaaccctatctctactaaaaatacaaaaattagctgggcatggtgccaggcacctgcaatcccagctacttgggaggctgaggcaggagaatcacttgaacctgggaggtggaggttgcagtgagccaagattgtgccactgcactccagcctaggtgactccaccaaaaaaaaaaaaaaaaaaaaaaaaaaagaaaaggaaagaaagaaagaagagaaaaaaagaaaaaataaaagagaaaaaggcaggcaggcaggtcgggcacggtggctcacacctgtaatcccaacactttgggaggctgaggcaggcggatcatgaggtcaggagattgagaccatcctggctaacacagtgaaaccccatctctactaaaaatacaaaaattagccaggcatggtggtgggcacctgtagtctctgctactcgggaggctgaggcaagagaatggcgtgaacccaggaggcggagcttgcagtgagccgagatcatgccactgcactccagcctgggcgcagagcgagactccatctcaaaaacaacaacaacaacaaaaaagaatgtgaaaatattaccataaagagactatcaggtgcaggggatcaggaagaacaaaaatcaagcatatatatatatgctacgcttttaaatttcaggtaaatgtattggtggtttcttgtcttgatgaaatagtcatccaactacatatacaatattcagttttcagatgctctgggacaaaaaggctaaatgctgcatgaaaagcttgccttgataaaccaaaagtttctgatgttccatgcaggggaaaacaagcaaacaaaaacgctcttaattaaagaggttactactgcatgttgtggccaaggggaagtgaaaggcaagaacacatccttgtcctgcattctgaaaaacctcggagatcaggagccagaatgtccacaccaatggcattcccatcactgaaagacaatttcaaacttcagaataagcaaaaatatccacagcccccttctatgtgttgatacctccaagtacatttaatactctttcatttaaaaagttttagtttatttgttcagttcatttatgaagctaatgtcactaattttccccctagtttttgacttctaccaagtatataagctctgtttagaacagtcagggccgcagagtactaaccttcagacaggatcacttcagatggagaatataggcaatgacattttataacaagggtgcattccttaagatctgcacaactcaaacactattaatgaaagctagttccagtgagaaggcaggtttctgcagccaacacatgtgatgctgtcacgctgccaggcccaataaggtctgcaaagcccttacaccattagcttagaagtgttttaattcttgatcaattttttcttccatttcaagatgtatttgtgttatttacaacatttttcacataaagggaattttattaatagttctgatgttgtattacatcttacctaatttttttcttttttctggagaaagtgtcttgttctgtctcccatgctggagtacagtagcatgatctcagctcactgcaacctccacctcccggatttaagcgattctcgtgcttcagcctcccaagtagctgggactacagacatccactaccacgcctggctaatttttgtatttttagtagagatggagtttcaccatgttggtcaggctggtctcgaactcctggcctcaagtgatttgcccgccttggtgagacaccacgcctgcccatatctaatttttaagaaaatgaaatcactgctatctaacattaatagaatcaaataataaataaataaataaaaataattaatagaatcatattaaaatggtttttataagaaagcaataataacatgttaaagtgctaacctaataacctaaaaacaatgagatatcaccttttcattcataacccatagaccagaagaatgaatttcttacggctacctcttggctcctgtgcacaccattttcccagaactgaaaatcagtgccgtggttcgtggctctcttatcctcatgattaccgcagcaaaccgctacaatggtcagagagaatcattagtgaggtcatgccaaactgctcaatgttgttaggcgaaccacccattgacaaaaaaatcacaactggtaggaaggacatagtacatctagttatcaaaatatttgttctgtatttctgtatatctgtaaaggatttgcatacaccacatgtaacaaatattcctttgcataaggagcagaaaataatcaattgtgactaagttataccaaatctgtatgttctttcacatgagcattccatcaagagaaatgtttgcaaaatttggttatgttctcaataaatacaagtgcttctgtttctactttatatttgctgcttatcatgactatagcttctctgatacattttgttttattaatatgaattttgaggcaaataaaccaataaaccttttctaccttaatggaattaataaatcagattacaagcctatcaatacgtaatgaagtaaaatcatgctttcaattggtctttagaaacaatattaatgtattaaacacataaatgcaaattaggaaaaaaacacagttttaacttttattttctgctttttatgcttgaaacatgttaattctttcagaaaattttcttgctaaggtggtaactcaaggggaaaatatttcaactgtgggttgaattaatggcctcagttattaggtacatgataaaaagcaaataattactttgaaacaacttaaatattttaatacatttaattatacaataaaaacctacatgtttctaattaagacgactctttgacaaactagattgctttaacaattttatttttttattttattaatttttttttttagagacaagagtctcactttgttgcccagactggagtgcagtggtgcaatcatggctcactgcagcctcgaattcctgagctcaagagatccttctgtcttggcctcccaagtagctgggattataggtgtgtgccaccaaccccagataattttttaaattttctgatgaaacaaggccttgctatgttgcccaggctcgtcttgaactgttggcctcaagtgatcctcccaccttggcctcccaaagtgctggaattacaggtctgagtcaccatgcctggcttttaacaattttagtttaaaacctgctctatgtcttccctgtgattttatcaacatctaaaaaagctagcagtatatagtagtttatatacgtcccaggaaaagcctagctattttgaatttccagaatttcctctactatttttattggttaaatatcacttaagaacgtaaagtaataaaattatgtattcaactaaatgtgattataatagatgaaagattaattcttagaatgctacatgtcatacagactcattatgagtggttaaaaggtgattttcagacccttagctgtctttcagatctcaggcattatgtttcagggattttaaaatgcaccctaagtccattacttaacatttctctcaacccagctaatgtttatccaaattactttgcctactatagctggctaacatcatccctatacatatacaaaattcttcacatgatcccaatacaatacatatataacttagcttattttatagactgctgtactcccagggattcttatatcacagacactcaataaaagatacaaaacaatgcacattttactttagatcttcattttattggtgtcaaggaataagcataacacaaactctttgatatacagattttttttttgaggcggagtctcgctctgttgccaggctggaatgcaatggcgcaatctccgctcactgcaacctctgcctcccaggatcaagtgattctcctgcctcagcctcccaagtagccgggattacaggcgcatgccaccactcccggcaaatttttgtatttttagtagagacggggtttcactatgttggccaggatggtcttgaactcctgacctcagatgatccgcccacctcggcctcccaaagtgctgggattacacgtgtgagccaccaagcccggccaattttttttttttttttaagagacagggtcttgccatgttgcctgggctggtggtgaactcctaggttcaagaaattctccttcctcagcctcccaaagtgctgggattacaggcattagccactgtgcctggcctgatctacagacatttgttttatagcgtgaaatacattaaaatatagagacacggcagaggagacaaaaaagaaaaaaaaaagaaatacattaaaatagatctaaccttgggattatattcggcgtttcgggcacgaagtgcaatggtctttaggtcaagtttacaaccaagattcactgtggatacaatatttctgtaagagatttaaaaagaaaacacgactatttaaattacttaagtttcattggatgaggcgttagaaattatgcagacatctgattatttcaaccaggctttacttttttttaattgctcacatttattgtttaacaagtatcatgcacatgttgagcattttatatagattattccatttaatacatataacgcactgaggtagaagttaccagtattcccacatttggataaataagctgaggcttaaaggtagagtgcaacttgctcaggacgcaatggctcccaagtggaggagccaggatttgagtctgtctgtctccagagcctgcccttagccttctcacagacaaactcaattctcatctgtgagctctgaaaagctaccaccaccaccctattcctaagtaactatttataatgaaaacaagcaggcatgaactgcccagttctctcaaagtaagtatcttttgaaaaacaagagctaagtgtctttagcaaaaaaaaaaggcaaaaccctgctttctcttctaattaactctcagtaaataaggataaatggagccatctgggtccactgacccttttcatttctcagtgttcttaaatcacttaacgaataacttatacaaggataaagatatactaaaaagcaactctattagaaattttaataaaaatttaaacaacaaacccacattttcattatacatttttctgcttatgaaagtatatatagttgaaatgggcaatgccctttgaatgcaattaactgctcaacaactgtctcgcatggacctggaaatcaccatcccaagaatatcgagtccagatttcaaatacataggttcaaatacaataggtttcagctcattgttgcttctggttctttttcttgtacagtctatgatacacaactgtaaagccaattaggttgatccacacaatgaatgttttcatttccatatcatctatttccttccaatcacccttgtatacacacctgcctttagcatttgtccacttatgaactataccaagtagattttagtatatctatcacaactttagtcacataattgttaaatgtattcttatatattttcattaattaaatatttaccttaatccctcttaagcctacaagatggagagggcactgaactaccacccgggagggttcttagtagatagtggaaattcaggaatgtggatgactggatgctctggggagtatcagaacagcaaaggcactcgcaagaaacaaacacctgactgtactgtttataatttattatttaaatcagaaatgcaaacttaaatattcctgggagtcagacaagcatgctggacacatgggagtggtatagacaagggtgagctaaaaagggctctctctaaaatcactaaaattactttgtttttaaaattgtgtgtggggtcaaacaaaattgtggaggcaagatttaggtctttgggtgaaagtcagcatccacgattacacaccacttagttccaaaaatgatgagagatagcttataaacaacaaccatatatgtaacaaggtgaataaatgcaaataggaaatactagatctaaagggagtatgaaggaggaaggtatctgtacaagaaaactgaggagatgcagagactgcaagtaaccttttaatttggtcataagctttctaaaatgaaaagctatacacttcttattgactggaattatttggaaatatttgctggtttttcaggaagatgaaattatttcctacccctactacactgttacatatagaacccacttcatttaggtagaaaaatccatttatgacaaaaacagtcgtcttcattttgtgggaaggacacagaccttcaaagatttatatgcagcacccatagtaaaaacaaaaaacaagaactaccagaaattatactgatattgtgactaaagacctaaaatagcataagggaaagagactacctaacattgtgatttagcgatatcagatacagggaaatgtctataatataataataacgacagtgaaagtcagattaaattttattggctcaggtatgtaaacacaaatgaccacatttctaaacctgttaagagccttttactgaggacactgactaagatagctttgcttccctttcccaaatgtgagataaagcaaattttgatacacaattaccgttagtgccactccctcccttaataaaaggatccatctgaaaacagagcaggaacataactcaaagggactcctaagtgggaggaaacataaaacacgaagtactcactgcagctgcggtacaatcccagaactctccgaagctggcgtggcaggagtgatgggggtcatgggagtcatgggggagggatacagtggagtggtgcccggcaagggtgcagttgtgagagtctgtgagtggaagagctgtggtgcctggcctgaggttccctgtgttgcctgctgggacgttgactgctgaacggctgcagctgccactgcctgttgctgctgctgctgctgctgctgctgctgctgctgctgctgctgctgctgctgctgctgttgctgttgctgctgctgctgctgctgctgctgttgttgttgctgctgctgcctttgttgctcttccaaaatagacagactattggtgttctgaataggctgtggggtcagtccagtgccataaggcatcattggactaaagatagggattccgggagtcatggcaccctgtggaaagcaaggagaaaaacaggttaggctggctgctgctaagtgtttgtggaactttcttggtggaacagcaggtcaggtgtgcaaagacagatgccttcggagaataatggggttattaaacattaattacggaagaaccagctattcttatacacattgctttcttctttaataccacacagtggataaacatgaagaaaaatggataaactgaacttcggaaaaattaaaaacttctgttctttgaaagacaccattgagaaaattaaaaggcaggccagactgggaaaaaaataactataatacatacatctgagaaaggactggtaaacagaataataaagagctctgacaactccataaaagaagatcaacaaataaaataataaaaaagggcaaaagatgtgaaggacatattacaaatgaagatacaggcatacctcggagatactacaggttaggttccagaccatctcaataaagcaagcggcatcaattttttggtttcccagtgcctacaaaagttatgttagcactaaagtctattaagtgtgcaatagcattatgtctaataatatgtatataacttaatttaaaaatgctttattgctaaaaatgctaacaatcatgtgagcctgcagcaaatcataatctttttgctgacagaggatcttgcctcgatgttgatggctgctgactgatcagggtggtagctgtggcaatttcttaaaataagactgacgaagtttgccacactgactgactcttcctttcactgaagatgtctctgtagcatatgatactatttgacagcattttacccacactagaacttatttcaaaattggagtcaatcctctcaaaccctgctgctgctttatcaactaagtttatgtaatattctaaagtcatcagttcttcaccaggagtcaattctatctcaagaaaccactttctttgcttactcacaagaagcaactcctcatctgttcaggttttatcaaaaaattgcagcaattcagtcacatcttcaggttcacttctaattctagttcacttgctatttccactacacctgcagtaacttccagcactgaagtctagaacctctcaaagtcatccacgagggttggaatcaacctcttccaaactcttattcatgttgatatttcaccctcctcccatgaatcatgaacattcttaatggcatctagaatggtgaatctttttcagaaggttttcaattcactttgcccagattcatcagaggaatcactatctatggcagctacagcatatgtccctccctgcttcctttctttgagacagggtctccattgtagcctttaacttctggactcaagtgaccctcccgcctcagcctcccaagtagctgggactacaggcacatgccaccatgaccagctaattaaaaaaaaatttttttttgtagcaacagggacttgttttgttacccaggttggtcttgagctcctagctttgagtgatccttccaccttggcctcccaaagtactgagattacaagcatgagccaccatgccctgctgtatttcttaaatagtaagaattgaaagttgaaattactccttgatccatgggctgaagaatggatatattatttaagcaggcatgaaaacaatattaatctccttgttcttctccatcagagcttgtggacaactagttacactgtcagtgagtaatattttgaaattaaactttttttctgagcagatctcaaagagcttaaaatatccagtaaatcatgctgtaaacagacgtgctctcatcaggttttgttgttctgtttactgaggacaggcagagtagatttagcgtaattcttaaggctctatggttttagagcagaacatgagcattggcttcaatttaaactcaccagctctattagcccctaactagtcagccagtcctctgaagctttgaggctaggcactgatttctcctctctagctataaaagtcctagatagcatcttcttccagtagaaggctgtttcatctacattaaaaatctattatttagtatagtcaccttcatcaattatctcagctagatcttccagataacttgctgcttcatgttgcatttttatgttgtggagaaggcctctctccttaaagctctgaataaacctctgctagtttcaaaactttcttctacagcttcctctccgctctcagcctttacagaattgaagagagttaaggccttgctctgtattacactttggcttaaggggatgtgtgggtggtatgatcttctatccagaccattcaaactttctccatataagcaataaggctgttttgctttcttatcacttgtgggtttactggagtagcacttctaatttcctttaagaacttttcccttgcattcacaacttggctaactatttggtgcaagaggcctagcttttagcctgtctcagctttcaacatgccttcttcactaagtataatcatttatagcttttggtttcaaatgagagatgtgcagctcttcccttcatctgaacacttaattaaaagtcactgtaaggttattaattagcctaatttccatattgttgtgtctcaaggaatagggaagaccaagcagagggagagagatgggggaatggttggtcacgctgcagacatttatcaattaagttcctgtattatacaggtgcagtttatggcattcaataataattacaatagtaacatcaaagatcactgatcacaataacagataataatgaaaaggtttgactaggcacagtggctcatgcctgtaatcccaacactttgggaggccaaggcggatggatcacttgcagccagtagtttgacaccagcatggtgaaactccgtctccactaaaaatacaaaatttagctgggtgtggtggcgcatgcctgtaatcccagctacttgggaggctgaggcaggagaatcgcttgaacacgggagatggagtttgcagtgagccaagactgcaccactgcactccagcctgggcaacagagtgactgaaaaaaaaaattaaaaaaaaaatacaaaaaaaaagaaaaaaaaaagtttgataacaataacggataataatgaaaaagtttgaaatcctgcaaaaattaccaaaatctaaccccaagacatgaagtgagtacacacttttggaaaaataatgccaacagacttgctgggtacaggtttaccacaaccttcaatttgtcaaacatgcagtaaagtgaagtgcagtaaagtgaggtgggcctgtgtatgagtggctgacaagcacttgccaaggtgctcagaaacattagtaatcaggcaaataaaaatcaaaaccacaataagatactactaagcaatcactagagtgaaagtaaaaagactgacagcagaaagtgttggtgaggatgtggagcaacttaaatctcttatgctgcaaaacaatacagccacttcaaaaaacagtttggcagtttcttataaagttatacatataccaatataggacctagcaatcctactcctaagtatttacccatgagaagtaaaaacagtgcattcaaagtctacacaaatgtttacagtgcttttattcgcaatagctccaaactggaaagaccccaaatgtgagcaactggagaatggatgaactgtggaacatccaaacaatggagtgatacttagctatacaatggattaactactgatatacaaacagtacactgggctaagaagtcagacatacacaaaaaagcatacactctgattccatctatatgaaattctagaatagacaaaactaatcttcagcattgaaaagcagatgcagtagttacctggggccagcagagtgactataaaggggaagaagggactttttaaggtaactgaaatgttctgtaatttatacattatatataattatcaaaacagacacttaaaatgagtttttttgtatgtatatttcaacaaaagttattgatttttttttttttttttttttttttgagacagagtctcgctctgtctcccaggctggagtgcagtggcacgacctctgctcactgcaacctccacctcccgggttcaagcaattctccttgcctcagcctcccgagtagctgggattacaggcacccgccacaacacctggctaatttttgtatattttgtagagatgaggtttcaccacgttggccaggctggtctcgaactcctgacctcaggtgatccgcccaccttggcctcccaaagtgctgggattacaggcgtgagccactgcacccaggctgaaaaatttttaaagtagatgggtggttgagagcttgaaatgtaaaaggggaaaaataaaactagaaaataatttggtgagggtgattttcaaaatcaaagaccctatatagtcatttggaacattctcataagtgtttatcaaaagattaggtgtttcataaatatataacttagcttccagacttcccaaataaacaccattgtgcctattcaaagcctaatagaacttctcaacaaaataaggcttaaaaaacatattaaaccattttcaaaaacagatcattaaatgcccttccttgccttttgataccatctcttgcagttcagatttccgccctccctattctctccctcctgctatattacctgaggggaggccaagccctgagcgtaaggtggcaggctgttgttctgatccatgatgttcactttcttcttggcaaaccagaaacccttgcgctggaactcgtctcactattcaattttttcctagagcatctccagcacactcttctcagcaacttcctcaattccttgggttatcttcacacgccaagaaacagtgatgctgctttggaaaaaagtctaaagtttaatttaaggatccaggtaacctgtacagtcctataagccagttctatggctatacaaaacacaaacatgaaaaccaatgaagctattttggaatacatttgtttttaccttataatcctaaagttttattccttccatgtttccggcgattgcatgtaaaatcgccaacaaaacaaaaatcattttgttacatgtttaaataatcggaaaatgctcaaaatcgagctgtcataaccagcattaaaaacttttgaggaaaaacacctagagaaaaataattcctaagcaaaatgtaatatcagagcagaatattcactaagcactgtatacacagcactgttaggcaaagtttagatctttaaatattccaattttacatcctctacaatgtcttgggcaaaaaattaagtaaatatcaaattcaatccaatatacttcagagtgatcatttatcaagctcctactgtaatgaaactgttaaaaaaaaaaaagccgcacaaagataaagccctgaatttttataaatgtaataaccttacctctttagaacacattaatgcaaactgtgcctgttatctgacttttcttaaatcatcatcgctttactcactacacatctgaaatgagtttataacaacatattctcacatagaacttagaggtctcaaagttacaaattatatgtccaaagatccttcaggcatatgcacttcaagcatgtgctggtacagaacagacactcagatatttgctgaatgtatgaaagactctgacgatcactttgaaagggcaaaggcccccaaagactatctatcctacatactcatcactgaaaaacagaccaaaaaagaaagcaagctctgcttctggaaataaatatatcagagatattttttaaaatatactttttttttgacagttatcctataataacaataacagaagtcctgcagatgaggatataaagataggaggatatagtccttggcatcaaagtgttcaatatgaagggtatgcaaataactactgtaaaacatagtattataacagcaggtatggtctaagctaagttccttgaatgcagaaaccagcctacatgtctttgtgatctctgcatctagcactatgcctggaatacagtatgtgatcatgaatgagcccatatacacccctggaagagaagacaatatagactaacagccaatcactgtgaagagagcgcagtgttttcacaaagcagggaccatctaacttgggtctcacaaggtgagtaggaatttacacatcagggcttcagacaaaagagaaatcaagcagaaagagacagattgaaaaagcatgcagtatgcaggcaacaagcttagtatgactgtatagaaggtcactgcagcagatgagacagcacatattggtgggctcatactatcaggagttttcaatgttattgcataggcaataataacagttatggaatttcggaagtgcagtatgaacagatctaatttggcaagactagatgaatttgagaggagtaaaactggaggacggaagtttcgtttcaggaatctaaggttgaggcaagagataatgacggcaggatttaaagccattataagtatgattagagatttatccaggaccttcggtggcttcaggccactttttgcaagtaagtctacagaagaaaccgcacagtgattactgcactaatttatcctcagaaaagagttgtttgctgggtatcttcatctcctggaaattgaaacatcaaatccgatattttttggaggcaatcaaattaattctgcatagccttctagtgtctgtataactaaatgaagcacagtcttttcacagaaaagtctacctagagatttggaaaaccatgatggcctgaaccgagagacgggagaccctgcaaataaagtggtgtgtattatatcttaagcgctaccgtgcccgctgtctcaggcttctgacaaaatatttaagtctcaatgttggcagcaaaacaggcgggcacagatctgggtgaatctgcttctaacatggagaagaagcggatggcaggacagggcagggtaaacttagggtcttcgatgcaagggactgtcctgtcccgcctgccgccgcccagccagccagtagtaccctgagccccacaatcgtacgatgggaagctgcctgcgaaacacagcagagtagggcaccaggcgggagtggcggccgagtggccgttacaggccggaacggcggcagcacgaaagggaggaacgtcccccgaggggcctgcacgcgcgccaattcctagtctcttccccaccattgcccccaggcctcagtgcagtggtggccttcgcccgaaccgtcagaaaagagtacaatctgttacctgggtcactgcaaagatcactatgggccagcggaagcgaagttaaacagccggcggcccaggcgcccgccacagcgaacctgcccgacctcac

SEQ ID NO: 278 - DNA, 18495 bp, Homo sapiens
ctaacacttttataaactgcatttattgtacagagtactctgaagaaagaaaaaaatatgtacagccattcattttcattaacacatatattctgtcctgcaatactggagaggtggaatgtgtctggcacagaaataacccctaggagttataaattagaaaaacaacacttttaaaaaagatttttacttttctggtagaaatataaaaactgtggttcatggggaaaaacattaaaattaaaaagtccaatcaattatagaggtggctttaacacttaaagttttctccctcaaaccaacttgtcaacagcagtgtttaaaatctacatataaataaatgggcagcgctgcccagatagcagcacggtatgagcaactcacagtcacgctgcgcggtgttctcagtgcacaaataatgccccttcccggcatcccgcggtgggcacttacagaagggcatcacctggtgccacaccctgcaactcaacatccatcttctcacaacaccaccatttaaaggtaccaaaacaaactgatttgtttaaaaaaaaaaaaagaagggggtgggggaggcaagggtacatgagagccattacgtcgtcttcctgaatccctttagaatagggtagatgttttcaaatgcttcataaatttctgctctgactttagcacctaagaagacaagttggagtagagatgagagactgaaatggcacttcttaacatattaagatggtaaaattcttaccttaaagctgcaagcacaattctcaccatacccagtcagattaaggcacaggcatgaaaacattaatggtggaatcccttgtcacaatcttatttttgtttataaaacaatacttttaaaaaatcatcttagtgactccagcgtctcattctatagctcaagaggcatgtattcacacttctctccttggtcctgaaccaggccataaaccaagcaggacggcaatgataacaactgaatcttcttctctgaattgctgccttcaactagactcatttctgaatcttcctttcttgtctcataatcatattgctgaggaatcctaaagcttcagataactaattccaagtgaaaacgccatcttttgttcaatgcaatgctcacctcctcactgtaaatggaagtctgcttgcagagctgtggtcagacttccctgctctcactgtgcctttagtgggcacgtttctcatcagactttgggtgggaggcctttgtacaagaagctagcccactgtccgaacactgaaatttcttttcagcactgagaaaatgccatactcaaaacacttacaaactttcagatactacttcctgttacaacttacctgttaatacaacttttccagaaacaaaaataaggagaacaattctgggtttgatcattctgtagattaaaccaggaaataactctggctcataactagaaggaaaattgcaaaaagtttagaaatcaagagctttgtgtgcttttagataaaatgaggacctgtacaaggaaaaatactgaataaacaaactagtcaagaggtaaaacacagttcttcaagcagcatcaaaggatagaatagaataattaaagcaagtgaggccgacttgtagtcgtcagttgataaccactggatggaaggctatttgtcctcctatcactttaccctatttctattgaatctggattttctgatttaagaaaaagagccctgtagttatgtctgcagtctctatatcattagatataatgatatctaatgcagataataatcctttacttttacagtcctaataattactattacagtcctaataatcatttacttctaagatccaatactgacagtttaacttttaatcatatcttacctccttaaattgaaatattctctagctgacaattgtggtcaggaaatttaatcaaacttatatactagcctgagaattaacctatacctgattaagctgtctgactgaatggactattggtatatattctttttttttttgagacggagtcttgctgtgtcgcccaggctggagtacagtggcacgatcttggctcactgcaacctccatctcctgggttcgaatgattgtcctgcctcagcctcccatgtaactgggattacaggcatgcaccaccatgtccagctaatttttgtatttttagtaaagacgaggtttcaccatgttggccaggctggtcttgaactcctgaactcaactgatctgcctgcctcggcctcccaaaatgctgggattacaggtgtgagccaccaggccaggcctggtacatattcttctaagcctagtaatctcatttttctcagttcggagagactgaaaacaggatgcctctgtttctgtgtgtctgacctaagacaaaattcaggacaggcttctctgaggaagagtggaatgggtagacatatggaactcaagtgggagcttcctaggtgaaaagggaaatgagcatactaggcataaaagtggcaagtgcaaaggcctagggcaggaggaaccaagtgagccccaggggcacacagaactaatgtgcctgtgaacagacaccagaagaccatgagatgaagcagtgaggtgggcagggctgcctgcctgtgagtcttcacctgcaagtagcagggaagataattagaaagttgttcctatcgctcaacttcacactttgctggtagatctgacacaatgttgactaaaagagaagatccaaactgggaaaaaaaattgatacaagaggttagggtcaattcatgcattccaagtgtattcagcaataaaacgataaaacatacagaagtagaatcaaattcattccagtaaaggggagttatgggtaccgcaaagtgataagggaagcagaggctggtgagggtgataaatatgactgagaacatcaggaagacaatgcaagaatacatacaactataaccatgtcaactgttctcatatactgaatattttgcatgtgttttattctgaacaatgtttagattataaatgaactgttgccaataacaatcataatacatttcagacttacctactaaattgttggtgggtgagcacaaggccttctaaccttataggaaacttcacatcacagctccccaccatgttctgaatcttgaagtccaagaacttagctggaaaacccaacttctgtacaactctagcatattttcttgctgccagtctggactgttcttcactagggaaaggaaaaaagtgagttattcatactcagagccagctaaaatacttatttagactaataacttataaaaagtccaaaacagtaaactaataaagtgtaaactggtcagccttcttgcaataggagaaaagactgacaggcattcacaattccttataaagtattcctggatccttgacagaaaactgtaggcctgccaaaatgacctttcaatccgccaaattattgtagccctagattttatggatgtgaattatcaccatcatcaatcatcactatttctgtattttagcccatgcatttctactgagaggaaaactaacaaacttcattttgatcagaaaatgttgatgagatttattattgaacaatgtattcactaattctatcctcttttataccaagactcatcatgaatagacattcctatgtcatttgttgaataaactacgacttagcagttcagagcttacataagaaaagcagaatgtgggccaggcatggtggctcacgcctctaatcccaagcactttgggaggccaaggcggatagctcacctgaggtcaagagttcgagaccagcttggtcaacatggtgaaaccctatctctactaaaaatacaaaaattagctgggcatggtgccaggcacctgcaatcccagctacttgggaggctgaggcaggagaatcacttgaacctgggaggtggaggttgcagtgagccaagattgtgccactgcactccagcctaggtgactccaccaaaaaaaaaaaaaaaaaaaaaaaaaaagaaaagaaaagaaagaaagaaagaagagaaaaaaagaaaaaataaaagagaaaaaggcaggcaggcaggcaggtcgggcacggtggctcacacctgtaatcccaacactttgggaggctgaggcaggcggatcatgaggtcaggagattgagaccatcctggctaacatagtgaaaccccatctctactaaaaatacaaaaattagccaggcatggtggtgggcacctgtagtctcagctactcgggaggctgaggcaagagaatggcgtgaacccaggaggcggagcttgcagtgagccgagatcatgccactgcactccagcctgggcgcagagcgagactccatctcaaaaacaacaacaacaaaaaagaatgtgaaaatattaccataaagagactatcaggtgcaggggatcaggaagaacaaaaatcaagcatatatatatatgctacgcttttaaatctcaggtaaatgtattggtggtttcttgtcttgatgaaatagtcatccaactagatatacaatattcagttttcagatgctctgggacaaaaaggctaaatgctgcatgaaaagcttgccttgataaaccaaaagtttctgatgttccatgcaggggaaaacaagcaaacaaaaacgctcttaattaaagaggttactactgcatgttgtggccaaggggaagtgaaaggcaagaacacatccttgtcctgcattctgaaaaacctcggagatcaggagccagaatgtccacaccaatggcattcccatcactgaaagacaatttcaaacttcagaataagcaaaaatatccacagcccccttctatgtgttgatacctccaagtacatttaatactctttcatttaaaaagttttagtttatttgttcagttcatttatgaagctaatgtcactaattttccccctagtttttgacttctaccaagtatataagctctgtttagaacagtcagggccgcagagtactaaccttcagacaggatcacttcagatggagaatataggcaatgacattttataacaagggtgcattccttaagatctgcacaactcaaacactattaatgaaagctagttccagtgagaaggcaggtttctgcagccaacacatgtgatgctgtcacgctgccaggcccaataaggtctgcaaagcccttacaccattagcttagaagtgttttaattcttgatcaattttttcttccatttcaagatgtatttgtgttatttacaacatttttcacataaagggaattttattaatagttctgatgttgtattacatcttacctaatttttttcttttttctggagaaagtgtcttgttctgtctcccatgctggagtacagtagcatgatctcagctcactgcaacctccacctcccggatttaagcgattctcgtgcttcagcctcccaagtagctgggactacagacatccactaccacgcctggctaatttttgtatttttagtagagatggagtttcaccatgttggtcaggctggtctcgaactcctggcctcaagtgatttgcccgccttggtgagacaccacgcctgcccatatctaatttttaagaaaatgaaatcactgctatctaacattaatagaatcaaataataaataaataaataaaaataattaatagaatcatattaaaatggtttttataagaaagcaataataacatgttaaagtgctaacctaataacctaaaaacaatgagatatcaccttttcattcataacccatagaccagaagaatgaatttcttacggctacctcttggctcctgtgcacaccattttcccagaactgaaaatcagtgccgtggttcgtggctctcttatcctcatgattaccgcagcaaaccgctacaatggtcagagagaatcattagtgaggtcatgccaaactgctcaatgttgttaggcgaaccacccattgacaaaaaaatcacaactggtaggaaggacatagtacatctagttatcaaaatatttgttctgtatttctgtatatctgtaaaggatttgcatacaccacatgtaacaaatattcctttgcataaggagcagaaaataatcaattgtgactaagttataccaaatctgtatgttctttcacatgagcattccatcaagagaaatgtttgcaaaatttggttatgttctcaataaatacaagtgcttctgtttctactttatatttgctgcttatcatgactatagcttctctaatgatacattttgttttattaatatgaattttgaggcaaataaaccaataaaccttttctaccttaatggaattaataaatcagattacaagcctatcaatacgtaatgaagtaaaatcatgctttcaattggtctttagaaacaatattaatgtattaaacacataaatgcaaattaggaaaaaaacacagttttaacttttattttctgctttttatgcttgaaacatgttaattctttcagaaaattttcttgctaaggtggtaactcaaggggaaaatatttcaactgtgggttgaattaatggcctcagttattaggtacatgataaaaagcaaataattactttgaaacaacttaaatattttaatacatttaattatacaataaaaacctacatgtttctaattaagacgactctttgacaaactagattgctttaacaattttatttttttattttattaatttttttttttagagacaagagtctcactttgttgcccagactggagtgcagtggtgcaatcatggctcactgcagcctcgaattcctgagctcaagagatccttctgtcttggcctcccaagtagctgggattataggtgtgtgccaccaaccccagataattttttaaattttctgatgaaacaaggccttgctatgttgcccaggctcgtcttgaactgttggcctcaagcgatcctcccaccttggcctcccaaagtgctggaattacaggtctgagtcaccatgcctggcttttaacaattttagtttaaaacctgctctatgtcttccctgtgattttatcaacatctaaaaaagctagcagtatatagtagtttatatacgtcccaggaaaagcctagctattttgaatttccagaatttcctctactatttttattggttaaatatcacttaagatcgtaaagtaataaaattatgtattcaactaaatgtgattataatagatgaaagattaattcttagaatgctacatgtcatacagactcattatgagtggttaaaaggtgattttcagacccttagctgtctttcagatctcaggcattatgtttcagggattttaaaatgcaccctaagtccattacttaacatttctctcaacccagctaatgtttatccaaattactttgcctactatagctggctaacatcatccctatacatatacaaaattcttcacatgatcccaatacaatacatatataacttagcttattttatagactgctgtactcccagggattcttatatcacagacactcaataaaagatacaaaacaatgcacattttactttagatcttcattttattggtgtcaaggaataagcataacacaaactctttgatatacagattttttttttgaggcggagtctcgctctgttgccaggctggaatgcaatggcgcaatctccgctcactgcaacctctgcctcccaggatcaagtgattctcctgcctcagcctcccaggcgcatgccaccactcccggcaaatttttgtatttttagtagagacggggtttcactatgttggccaggatggtcttgaactcctgacctcagatgatccgcccacctcggcctcccaaagtgctgggattacacgtgtgagccaccaagcccggccaattttttttttttttttaagagacagggtcttgccatgttgcctgggctggtggtgaactcctaggttcaagaaattctccttcctcagcctcccaaagtgctgggattacaggcattagccactgtgcctggcctgatctacagacatttgttttatagcgtgaaatacattaaaatatagagacacggcagaggagacaaaaaagaaaaaaaaaagaaatacattaaaatagatctaaccttgggattatattcggcgtttcgggcacgaagtgcaatggtctttaggtcaagtttacaaccaagattcactgtggatacaatatttctgtaagagatttaaaaagaaaacacgactatttaaattacttaagtttcattggatgaggcgttagaaattatgcagacatctgattatttcaaccaggctttacttttttttaattgctcacatttattgtttaacaagtatcatgcacatgttgagcattttatatagattattccatttaatacatataacgcactgaggtagaagttaccagtattcccacatttggataaataagctgaggcttaaaggtagagtgcaacttgctcaggacgcaatggctcccaagtggaggagccaggatttgagtctgtctgtctccagagcctgcccttagccttctcacagacaaactcaattctcatctgtgagctctgaaaagctaccaccaccaccctattcctaagtaactatttataatgaaaacaagcaggcatgaactgcccagttctctcaaagtaagtatcttttgaaaaacaagagctaagtgtctttagcaaaaaaaaaaggcaaaaccctgctttctcttctaattaactctcagtaaataaggataaatggagccatctgggtccactgacccttttcatttctcagtgttcttaaatcacttaacgaataacttatacaaggataaagatatactaaaaagcaactctattagaaattttaataaaaatttaaacaacaaacccacattttcattatacatttttctgcttatgaaagtatatatagttgaaatgggcaatgccctttgaatgcaattaactgctcaacaactgtctcgcatggacctggaaatcaccatcccaagaatatcgagtccagatttcaaatacataggttcaaatacaataggtttcagctcattgttgcttctggttctttttcttgtacagtctatgatacacaactgtaaagccaattaggttgatccacacaatgaatgttttcatttccatatcatctatttccttccaatcacccttgtatacacacctgcctttagcatttgtccacttatgaactataccaagtagattttagtatatctatcacaactttagtcacataattgttaaatgtattcttatatattttcattaattaaatatttaccttaatccctcttaagcctacaagatggagagggcactgaactaccacccgggagggttcttagtagatagtggaaattcaggaatgtggatgactggatgctctggggagtatcagaacagcaaaggcactcgcaagaaacaaacacctgactgtactgtttataatttattatttaaatcagaaatgcaaacttaaatattcctgggagtcagacaagcatgctggacacatgggagtggtatagacaagggtgagctaaaaagggctctctctaaaatcactaaaattactttgtttttaaaattgtgtgtggggtcaaacaaaattgtggaggcaagatttaggtctttgggtgaaagtcagcatccacgattacacaccacttagttccaaaaatgatgagagatagcttataaacaacaaccatatatgtaacaaggtgaataaatgcaaataggaaatactagatctaaagggagtatgaaggaggaaggtatctgtacaagaaaactgaggagatgcagagactgcaagtaaccttttaatttggtcataagctttctaaaatgaaaagctatacacttcttattgactggaattatttggaaatatttgctggtttttcaggaagatgaaattatttcctacccctactacactgttacatatagaacccacttcatttaggtagaaaaatccatttatgacaaaaacagtcgtcttcattttgtgggaaggacacagaccttcaaagatttatatgcagcacccatagtaaaaacaaaaaacaagaactaccagaaattatactgatattgtgactaaagacctaaaatagcataagggaaagagactacctaacattgtgatttagcgatatcagatacagggaaatgtctataatataataacaacgacagtgaaagtcagattaaattttattggctcaggtatgtaaacacaaatgaccacatttctaaacctgttaagagccttttactgaggacactgactaagatagctttgcttccctttcccaaatgtgagataaagcaaattttgatacacaattaccgttagtgccactccctcccttaataaaaggatccatctgaaaacagagcaggaacataactcaaagggactcctaagtgggaggaaacataaaacacgaagtactcactgcagctgcggtacaatcccagaactctccgaagctggcgtggcaggagtgatgggggtcatgggagtcatgggggagggatacagtggagtggtgcccggcaagggtgcagttgtgagagtctgtgagtggaagagctgtggtgcctggcctgaggttccctgtgttgcctgctgggacgttgactgctgaacggctgcagctgccactgcctgttgctgctgctgctgctgctgctgctgctgctgctgctgctgctgttgctgctgctgctgctgctgctgctgctgctgctgttgttgttgctgctgctgcctttgttgctcttccaaaatagacagactattggtgttctgaataggctgtggggtcagtccagtgccataaggcatcattggactaaagatagggattccgggagtcatggcaccctgtggaaagcaaggagaaaaacaggttaggctggctgctgctaagtgtttgtggaactttcttggtggaacagcaggtcaggtgtgcaaagacagatgccttcggagaataatggggttattaaacattaattacggaagaaccagctattcttatacacattgctttcttctttaataccacacagtggataaacatgaagaaaaatggataaactgaacttcggaaaaattaaaaacttctgttctttgaaagacaccattgagaaaattaaaaggcaggccagactgggaaaaaaatacctataatacatacatctgagaaaggactggtaaacagaataataaagagctctgacaactccataaaagaagatcaacaaataaaataataaaaaagggcaaaagatgtgaaggacatattacaaatgaagatacaggcatacctcggagatactacaggttaggttccagaccatctcaataaagcaagcggcatgaattttttggtttcccagtgcctacaaaagttatgttagcactaaagtctattaagtgtgcaatagcattatgtctaataatatgtatataacttaatttaaaaatgctttattgctaaaaatgctaacaatcatgtgagcctgcagcaaatcataatctttttgctgacagaggatcttgcctcgatgttgatggctgctgactgatcagggtggtagctgtggcaatttcttaaaataagactgacgaagtttgccacactgactgactcttcctttcactgaagatgtctctgtagcatatgatactatttgacagcattttacccacactagaacttatttcaaaattggagtcaatcctctcaaaccctgctgctgctttatcaactaagtttatgtaatattctaaagtcatcagttcttcaccaggagtcaattctatctcaagaaaccactttctttgcttactcacaagaagcaactcctcatctgttcaggttttatcaaaaaattgcagcaattcagtcacatcttcaggttcacttctaattctagttcatttgctatttccactacacctgcagtaacttccagcactgaagtctagaacctctcaaagtcatccacgagggttggaatcaacctcttccaaactcttattcatgttgatatttcaccctcctcccatgaatcatgaacattcttaatggcatctagaatggtgaatctttttcagaaggttttcaattcactttgcccagattcatcagaggaatcactatctatggcagctacagcatatgtccctccctgcttcctttctttgagacagggtctccattgtagcctttaacttctggactcaagtgaccctcccgcctcagcctcccaagtagctgggactacaggcacatgccaccatgaccagctaattaaaaaaaattttttttttgtagcaacagggacttgttttgttacccaggttggtcttgagctcctagctttgagtgatccttccaccttggcctcccagtgagattacaagcatgagccaccatgccctgctgtatttcttaaatagtaagaattgaaagttgaaattactccttgatccatgggctgaagaatggatatattatttaagcaggcatgaaaacaatattaatctccttgttcttctccatcagagcttgtggacaactagttacactgtcagtgagtaatattttgaaattaaactttttttctgagcagatctcaaagagcttaaaatatccagtaaatcatgctgtaaacagacgtgctctcatcaggttttgttgttctgtttactgaggacaggcagagtagatttagcgtaattcttaaggctctatggttttagagcagaacatgagcattggcttcaatttaaactcaccagctctattagcccctaactagtcagccagtcctctgaagctttgaggctaggcactgatttctcctctctagctataaaagtcctagatagcatcttcttccagtagaaggctgtttcatctacattaaaaatctattatttagtatagtcaccttcatcaattatctcagctagatcttccagataacttgctgcttcatgttgcatttttatgttgtggagaaggcctctctccttaaagctctgaataaacctctgctagtttcaaaactttcttctacagcttcctctccgctctcagcctttacagaattgaagagagttaaggccttgctctgtattacactttggcttaaggggatgtgtgggtggtatgatcttctatccagaccattcaaactttctccatataagcaataaggctgttttgctttcttatcacttgtgggtttactggagtagcacttctaatttcctttaagaacttttcccttgcattcacaacttggctaactatttggtgcaagaggcctagcttttagcctgtctcagctttcaacatgccttcttcactaagtataatcatttatagcttttggtttcaaatgagagatgtgcagctcttcccttcatctgaacacttaattaaaagtcactgtaaggttattaattagcctaatttccatattgttgtgtctcaaggaatagggaagaccaagcagagggagagagatgggggaatggttggtcacgctgcagacatttatcaattaagttcctgtattatacaggtgcagtttatggcattcaataataattacaatagtaacatcaaagatcactgatcacaataacagataataatgaaaaggtttgactaggcacagtggctcatgcctgtaatcccaacactttgggaggccaaggcggatggatcacttgcagccagtagtttgacaccagcatggtgaaactccgtctccactaaaaatacaaaatttagctgggtgtggtggcgcatgcctgtaatcccagctacttgggaggctgaggcaggagaatcgcttgaacacgggagatggaggttgcagtgagccaagactgcaccactgcactccagcctgggcaacagagtgactgaaaaaaaaaattaaaaaaaaaatacaaaaaaaaagaaaaaaaaaagtttgataacaataacggataataatgaaaaagtttgaaatcctgcaaaaattaccaaaatctaaccccaagacatgaagtgagtacacacttttggaaaaataatgccaacagacttgctgggtacaggtttaccacaaccttcaatttgtcaaacatgcagtaaagtgaagtgcagtaaagtgaagtgggcctgtgtatgagtggctgacaagcacttgccaaggtgctcagaaacattagtaatcaggcaaataaaaatcaaaaccacaataagatactactaagcaatcactagagtgaaagtaaaaagactgacagcagaaagtgttggtgaggatgtggagcaacttaaatctcttatgctgcaaaacaatacagccacttcaaaaaacagtttggcagtttcttataaagttatacatataccaatataggacctagcaatcctactcctaagtatttacccatgagaagtaaaaacagtgcattcaaagtctacacatatgtttacagtgcttttattcgcaatagctccaaactggaaagaccccaaatgtgagcaactggagaatggatgaactgtggaacatccaaacaatggagtgatacttagctatacaatggattaactactgatatacaaacagtatactgggctaagaagtcagacatacacaaaaaagcatacactctgattccatctatatgaaattctagaatagacaaaactaatcttcagcattgaaaagcagatgcagtagttacctggggccagcagagtgactataaaggggaagaagggactttttaaggtaactgaaatgttctgtaatttatacattatatataattatcaaaacagacacttaaaatgagtttttttgtatgtatatttcaacaaaagttattgatttttttttttttttttttttttttttgagacagagtctcgctctgtctcccaggctggagtgcagtggcacgacctctgctcactgcaacctccacctcccgggttcaagcaattctccttgcctcagcctcccgagtagctgggattacaggcacccgccacaacacctggctaatttttgtatattttgtagagatgaggtttcaccacgttggccaggctggtctcgaactcctgacctcaggtgatccgcccaccttggcctcccaaagtgctgggattacaggcgtgagccactgcacccaggctgaaaaatttttaaagtagatgggtggttgagagcttgaaatgtaaaaggggaaaaataaaactagaaaataatttggtgagggtgattttcaaaatcaaagaccctatatagtcatttggaacattctcataagtgtttatcaaaagattaggtgtttcataaatatataacttagcttccagacttcccaaataaacaccattgtgcctattcaaagcctaatagaacttctcaacaaaataaggcttaaaaaacatattaaaccattttcaaaaacagatcattaaatgcccttccttgccttttgataccatctcttgcagttcagatttccgccctccctattctctccctcctgctatattacctgaggggaggccaagccctgagcgtaaggtggcaggctgttgttctgatccatgatgttcactttcttcttggcaaaccagaaacccttgcgctggaactcgtctcactattcaattttttcctagagcatctccagcacactcttctcagcaacttcctcaattccttgggttatcttcacacgccaagaaacagtgatgctgctttggaaaaaagtctaaagtttaatttaaggatccaggtaacctgtacagtcctataagccagttctatggctatacaaaacacaaacatgaaaaccaatgaagctattttggaatacatttgtttttaccttataatcctaaagttttattccttccatgtttccggcgattgcatgtaaaatcgccaacaaaacaaaaatcattttgttacatgtttaaataatcggaaaatgctcaaaatcgagctgtcataaccagcattaaaaacttttgaggaaaaacacctagagaaaaataattcctaagcaaaatgtaatatcagagcagaatattcactaagcactgtatacacagcactgttaggcaaagtttagatctttaaatattccaattttacatcctctacaatgtcttgggcaaaaaattaagtaaatatcaaattcaatccaatatacttcagagtgatcatttatcaagctcctactgtaatgaaactgtaaaaaaaaaaagccgcacaaagataaagccctgaatttttataaatgtaataaccttacctctttagaacacattaatgcaaactgtgcctgttatctgacttttcttaaatcatcatcgctttactcactacacatctgaaatgagtttataacaacatattctcacatagaacttagaggtctcaaagttacaaattatatgtccaaagatccttcaggcatatgcacttcaagcatgtgctggtacagaacagacactcagatatttgctgaatgtatgaaagactctgacgatcactttgaaagggcaaatgcccccaaagactatctatcctacatactcatcactgaaaaacagaccaaaaaagaaagcaagctctgcttctggaaataaatatatcagagatattttttaaaatatactttttttttgacagttatcctataataacaataacagaagtcctgcagatgaggatataaagataggaggatatagtccttggcatcaaagtgttcaatatgaagggtatgcaaataactactgtaaaacatagtattataacagcaggtatggtctaagctaagttccttgaatgcagaaaccagcctacatgtctttgtgatctctgcatctagcactatgcctggaatacagtatgtgatcatgaatgagcccatatacacccctggaagagaagacaatatagactaacagccaatcactgtgaagagagcgcagtgttttcacaaagcagggaccatctaacttgggtctcacaaggtgagtaggaatttacacatcagggcttcagacaaaagagaaatcaagcagaaagagacagattgaaaaagcatgcagtatgcaggcgacaagcttagtatgactgtatagaaggtcactgcagcagatgagacagcacatattggtgggctcatactatcaggagttttcaatgttattgcataggcaataataacagttatggaattttggaagtgcagtatgaacagatctaatttggcaagactagatgaatttgagaggagtaaaactggaggacggaagtttcgtttcaggaatctaaggttgaggcaagagataatgacggcaggatttaaagccattataagtatgattagagatttatccaggaccttcggtggcttcaggccactttttgcaagtaagtctacagaagaaaccgcacagtgattactgcactaatttatcctcagaaaagagttgtttgctgggtatcttcatctcctggaaattgaaacatcaaatccgatattttttggaggcaatcaaattaattctgcatagccttctagtgtctgtataactaaatgaagcacagtcttttcacagaaaagtctacctagagatttggaaaaccatgatggcctgaaccgagagacgggagaccctgcaaataaagtggtgtgtattatatcttaagcgctaccgtgcccgctgtctcaggcttctgacaaaatatttaagtctcaatgttggcagcaaaacaggcgggcacagatctgggtgaatctgcttctaacatggagaagaagcggatggcaggacagggcagggtaaacttagggtcttcgatgcaagggactgtcctgtcccgcctgccgccgcccagccagccagtagtaccctgagccccacaatcgtacgatgggaagctgcctgcgaaacacagcagagtagggcaccaggcgggagtggcggccgagtggccgttacaggccggaacggcggcagcacgaaagggaggaacgtcccccgaggggcctgcacgcgcgccaattcctagtctcttccccaccattgcccccaggcctcagtgcagtggtggccttcgcccgaaccgtcagaaaagagtacaatctgttacctgggtcactgcaaagatcactatgggccagcggaagcgaagttaaacagccggcggcccaggcgcccgccacagcgaacctgcccgacctcactgaacccctggcgcgcgttgataatgt

SEQ ID NO: 279 - DNA, 426 bp, Homo sapiens; identical to SEQ ID NO: 276

SEQ ID NO: 280 - DNA, 870 bp, Homo sapiens
aaaactttgtgtagcatgcctggttgtacgataagagctgagtgaaagatgcagtatcccttttccacacggaaaagccaaatagcatcagcaacaacaaatagaataatgcagtggtttctatcatgctaatttattttgctttggagcaggtacctttcctctatggcattattttcttgcatttctcataaaggggaggatgcatcccaactgaatggctcactggcatgtcttttatgtgttcagttgccattcctagctttggaaagtttctatctgtccatgtgtatacaagtcaatgccccatttttgtttttcttttaaccgaggtgtagataggaaaaggacatttttaattacttaataaccggaaatgcagatgtgtaaggagaatgagaggaatgagttaaagtggttatgcatttttctatagatgagccattacagcaaggaattttacagttgacttctctgaacctagctttaccacagtgattaaatcctatttagaaaggggaatctgatttaaatgtgtgattccttgtatttgctcctatcacaaaagatatattaaaggaggtatgccattaatgaaatccactgtcctgagtattatctttcctcctgttgtactttctcagagactatggcagaatatctggatcttccttggattttgtacacatattgtagtgaaatgtgtcctacatctgaaattgcatgggactcatgcccagcaatctggttctaggcctttgacacctgataatatgagagcaattggccagccaatagccataagcccagaggattttagagcttcatgtgtggcttttaagagcaggtttgaaaaaaaaaaaaaaagac

SEQ ID NO: 281 - DNA, 868 bp, Homo sapiens
aaaactttgtgtagcatgcctggttgtacgataagagctgagtgaaagatgcagtatcccttttccacacggaaaagccaaatagcatcagcaacaacaaatagaataatgcagtggtttctatcatgctaatttattttgctttggagcaggtacctttcctctatggcattattttcttgcatttctcataaaggggaggatgcatcccaactgaatggctcactggcatgtcttttatgtgttcagttgccattcctagctttggaaagtttctatctgtccatgtgtatacaagtcaatgccccatttttgtttttcttttaaccgaggtgtagataggaaaaggacatttttaattacttaataaccggaaatgcagatgtgtaaggagaatgagaggaatgagttaaagtggttatgcatttttctatagatgagccattacagcaaggaattttacagttgacttctctgaacctagctttaccacagtgattaaatcctatttagaaaggggaatctgatttaaatgtgtgattccttgtatttgctcctatcacaaaagatatattaaaggaggtatgccattaatgaaatccactgtcctgagtattatctttcctcctgttgtactttctcagagactatggcagaatatctggatcttccttggattttgtacacatattgtagtgaaatgtgtcctacatctgaaattgcatgggactcatgcccagcaatctggttctaggcctttgacacctgataatatgagagcaattggccagccaatagccataagcccagaggattttagagcttcatgtgtggcttttaagagcaggtttgaaaaaaaaaaaaaaaa

SEQ ID NO: 282 - DNA, 868 bp, Homo sapiens; identical to SEQ ID NO: 281

SEQ ID NO: 283 - DNA, 750 bp, Homo sapiens
cttcaaagcaaggaaataagatgctgtatatgcacacataaatgcattgataatgtaaatatcctattcacgctaatgaattactagatattaaaagtggggggtggaaatcattgtagccctttattgatgacacccattcattctggcttcagaccttgcagaggttggccatatctttttaaaagtgtcattgatgataaaagggactacccaaggctaaagcgtcaacatttttcagaacaattgcttttctcattatttacaacctatataattcaactttgaaataacccttattttgaaaaaaactgttctaggtatggcatgttttgttttttccctcaggtatattcaatacattcttcatatttgggggaactgcttttgaaaaagggatactgcatcttaacagttatcttcagtgtgcatccagtaaagtctgcgtgttgagtatttgagctacattccatatattttggccaccctcataccagaggacagccgtagttcaggaggctctgttttcaaaagcaagttcaaaagcacatgcacattgagggaagatgaaagaaaacaaaaaccaaccatgcccatttaacttcagattacagagcacaaaatgtggagtgccattaacccattgattgattgtggctgtagaatttaaaaagcaaacatggggggggtggggaatcatctgtatccagggtaagaatgaccaatattttcacatgggatcatcctaat

SEQ ID NO: 284 - DNA, 750 bp, Homo sapiens; identical to SEQ ID NO: 283

SEQ ID NO: 285 - DNA, 750 bp, Homo sapiens; identical to SEQ ID NO: 283

SEQ ID NO: 286 - DNA, 13191 bp, Homo sapiens; identical to SEQ ID NO: 253

SEQ ID NO: 287 - DNA, 1316 bp, Homo sapiens; identical to SEQ ID NO: 254

SEQ ID NO: 288 - DNA, 309 bp, Homo sapiens; identical to SEQ ID NO: 255

SEQ ID NO: 289 - DNA, 9740 bp, Homo sapiens
ttttctgctacaggattatagctggacagacatccgctgcccctttgaaaaacgaagagatgcagcatgcgtgttttgggacaatgtagtatacattttgggaggctctcagcttttcccaataaagcgaatggactgctataatgtagtgaaggatagctggtattcgaaactgggtcctccgacacctcgagacagccttgctgcatgtgctgcagaaggcaaaatttatacatctggaggttcagaagtaggtaaggacttcttaagtattttggtttggggcatatgctttaaagccaagtatcttggctttcatatttaaataaacagctggtattatttgtccagatactttcttggtaatttaaatatgtgtttgtcacattttagagctcatctccctgaaggtttatgtcgttgctttacaaaccattaaattacagaactttagcttcctagattaatggcccattttttttatcataatgaagcattagttgacattatctgaattatagttctaaattatttgggctgcataatattatttgttttaaagatttcagagttcaacttatagactctttaagaactcgttactatattcaggcttttaaaatttgtattatatttgctttctttttattagaaaaaagaatgctctttttcatttgttttattctttaagtttttaatgactgtagtggtatttatgcttattgagcagaatgggatgtgggtgtggatataaaaaccttattggatagtgtgttagtgtccagtagtgctctttttctaaatgaataatttttctaaatgaataggtgcaggctagatacataatagcttttgtatgctttcattttcaagtaatttctttagcttaaataatgggctaataaagaaaactagggagaccgtaaatggttatacttttggtctgcatacttatgtttttaccctcaactatatgtcaaatgaatacaagaaaaatcactatttcctaaatgtaaccatttcctctctttaaaagcattcttcacagactgttataatgtagaatatttcaaatacaataaatcctaaagatgatagacggtaactgttctgtggtactgcagataacttcatttcttcagcctttgctaagtgtgtttttagcttaagtagtagtttttttttaatctactatatactatatattttcctatagtgtccacccactgaacctaccaaatcaggaatgtttaaaaagttaaaaataagttatttttggtcatgaccattgcttcttctagttgttattttctgatctttacttttcacagaccttagttgcaacgcagaattataaaggtgttgtcgtttttaaatcatttgatattagcccagaatggtgggagatgagaaatagtttggtaacttctaaaattttttgtccttgggaaggaaaaaaaaaagcacttaaactttaatagtatcatttctaaaattttttattgaactcctacagtgtgtagaagtttcaaaacatgatgaatgtatgttttgcctttaaattgtgtaatcaaaatacatcagaaatatacatcaatattttgagaatatactcaagcagggaccagtgtgatttcaggatataccacactaactgagaatagttaggaaatataattttgttaatggtgctgtagctattccagaatattaaataagaatatgatcagatagtagttttcatattttaaggtatgggtctaccatctgtaaggaactattatgcttttccactttatataaacatttgaagtatggataattcccgtcatgcataatggggcttgaagacatatataaggcttcttatttaatttttcttttgaaatcaaatttatttttctaaagtttaattaccaataaataagtatttccaacagatccttttaaggatgttttccagggtctatacaaacaggattattagcgttttcttaaactattcctacactttgttgttgttgattgagtatgaaaatggccgtatgaccctaaattcttccttccttaactaataagatctacagtcagttctttccaaacccccgcacacactaaagttaagcatgatggggcctttttcttttacaggaaactcagctctgtatttatttgagtgctatgatacgagaactgaaagctggcacacaaagcccagcatgctgacccagcgctgcagccatgggatggtggaagccaatggcctaatctatgtttgtggtggaagtttaggaaacaatgtttctgggagagtgcttaattcctgtgaagtttatgatcctgccacagaaacgtatgtatctatttaaaatttattttacagttaactgtattctataagctctgtaggagatgtcaaaagaccagaggaacccaacagaagaattttgtccttgagtgaagagtgtatataaacttttgagtgtgctagggtcagtggcatatttatgacctggacctttcccttacaccagaaatggcttgaacttacaccccatgggaacctctttctttctggttctgcgtgcaataaatgcctatgaatgagacacatctgattgattcgtcaactcataaaatgtttttgtttgagcggtcaggaaatgtagaggaggaggggggagtttatgaccagcaataaatttatccttaagtagaaatattagatattggctcatggcattaataaatcatgcctccctagttctttttaggtgtaaacttcctaagtacatttagattcatgtttattaaataaaattattcttaaatcaactgcttttaaaaaggcaaagtgtgtcaaaaaggtaaaatgctaaagaaataactggttagccagtttttctgaccttgtagttaatgatggaacacattcaatgtagccaaaggaaatgtgctaatcattgaataatggagagggcatgagggcacgggttgtgagtagtgacattaaagctgatgaggacataaaacagatgataccctagtcgtaccttttatggaaacatccaaagagctttgataagaaaagtcacttgatcatatggctggattgcccatcgttcttcccttactagaacaagttactgggtgaatacgttcactaaaatgctatgccagagttgcatcaaaactctcgtgcttaaagttttatatttaggaaatattgccaaactacaaaacatggaagtcttcaactccagctactgctttttttaaaattaagaaataagatgccaggcatggtggctcatgcctataattccagcactttgggaggctgaggcaggcagatcacttgaggtcaggagtatgagatcagcctggccaacatggcaaaatcccgtctctactaaaaatacaaaaactagctgggtgttgtggcgcgtgcctgtaatccactactggggaggctgaagcaggaaaattgcttgaacctgggaggcggaggttgcagtgagccaagattgtgccacagcactccggcctgggtgacagagcaagactccatctcaaaaaaaaataaaaaataaaaaaataagagcttaattataaaatatgattaattatgtgcatttatctatgattcccacatatttttaaaagatttaaggaagcataatcaataacttctttccagtgcaaataatagaaaagcaagttgtcttgaaatttgtcttttgctaaagatgtttaccaactttgctcccttttatgtgaacctctaccttacttcccataaaccctaggctcaaaaagtgttacagcatactagttggaaaactgattcattctgctaattattttttatttctaaaaaatctcttaaaagagaagccataaccataaaaactctaggtttctaaatttttacatctttattcaggcactatcaatgtaaattaatattgattttttacttacttttttgttcaaagtaaaaatataaaggagttctgcagcttctgtattttttaaaactaggtgaatattcagtttcaggaatatttaaaaacttacaagacctagcatttctttcattttatatatattgagcttaaatttgaattctctatgttcccttcaatgcccttaaattttcacaaatgaaaagctagtgtgaatataattatccaactctcaaaataaatgttatattatttccttttaaaaatgttacctagtccaggtgtggtggttcatacctgtaatcccagcactttgggaggccgaggctggtggatcgtctaaggtcaggagttcgagaccagcctgaccaacatggtgaaactctgtctcgtctaaaaataccaaaaaaaattagccgggcgtggtggcgcgtgcctgtaatcccagctattcaggaggctgaggcaggagaatcatttgaacccgggaggtggaggttgtagtgagctgagatcgtgccattgcactgcagccagggcaacaagagcgaaactctgtctcaaaaacaaaaacaaaaataaaaacaaaaagttatctagccagccaagttttttttaataagaatttcttcccaattttgacattttaagtgtttgataattagaatgtgtttaattggaagctgaaaaactaagcctatggaccatagaaacacaaataacacatgttgtcactcatgtgggagctaaaaatgttgatctcatggaggtagagagtagaatgatggttatcagaggttggttaacaagtacagaaatacagttagataggataagttctaatattcagtagtacagtagggagactatagttaacaataatttattgtatatttcaaaatagctagagaagaattggaatgttcccaacacaaagaaaagatattcctcagcagcaacatgggaggcctgggttccttccctagcccaaaaagaaacaaaaggaaagataaatgtttcaggtgctggatatcccagttactctgacttgatcattacacattgtatacatgtgtcaaaatatcacaggtaccataaaaatatgtacatgtattatgtatcacatttttaaaatcagttttaaaaaagatggagaggagcagaagctcataataaagtaactgaagaaagaaagaaattatgtctatggaaacaatgtgacacagtttgagcggtcagaattttaagaaatgactttttttttttttttttgtgagacggagtctcactctgtcaccatgctggaatgcagtggcacgatctcagctcactgcaacttctgcctcccaggttcaagcgattctcctgcctcagcctcctgagtagctgggattacaggcgcacgccaccacacgggctaatttttgtattttcagtagagacggggtttcaccatgttggccaggatggcctccatctcttgaccttgtgatctgcccaccttggcctcccaaagtgctgggattacaggcgaaaaaacgcttctaaacattaaacttcagattgcagatagcggggacctagtatgtactctgcatgtgaattataggaggaaggggaatttgtgaaagttttttctaaaccttcaggagatttagatatacataaagacatgctgtctttttatatcattaacattatatttggagaagaaagtggtatgtaaatggaatttttccaagtcaaatactgtgttttaatgcatgatgatagctgagtctataaatctcactacgtgcagggcagtgaagacctagtttttactgctgtcccacttccgagctgtatgccggtcacttcacctggatgagcgtgtgtgtttttcctaaaaacaggagccatgctgtccacctcaccttaacagagaactttgaaaatgagagtggtgactgtcaaaccatttttaaaacaatacataaatgtaagacaaaagaattgttaatacttcagagttaatcattgtgccttaattatgttttataaagttgaattcatcaaattgttttttgttttttgagacggcgtctgcctctgtcgcccaggctgcagtgcagtggcgtgatctcagctcactgcaagctccgcctcctgggttcacgccattctcctgcctcagcctcctgagtagctgggactacaggcgcctgccgccacgcctggctaattttttgtatttttaatagagacggggtttcaccgtgttagccaggatggtctcgatcgcctgacctcatgatccgcctgcctcggcctcccaacgtggtgggattacaggcgtgaaccaccgcgcccggccggccatcaaattattttaaagaagagatataaacaataattatagagagttactcttatgccaagtttcccttttgttgttgtccttactgttgtttggcgtctcttggtttaagttagctgctgaaagcacaagcctgtgtgccagtaccaccttcacaatcacaaatgtcagtcttgggagtgtatgcagaagaatgtattaaatctcagaaaaaaataactaaactcgattgtctgtgtatatatgcataatgctgcaacctgtgaattaatatcctttaacacttgggtccacatttatattctcagtttcattatttatatattagtggctgtgaacagagcaacatgaggtattaaacttgacagaatgatagtacttttttgttaccagagcagcataaagttcttagtgtagatttaaagatggacatgtgaatagtaacagatactattaatttcctgattgcctgaggcccattataagtttgtgttttacttacgcatatataaataataattaaagctaggtgtgatagaactagttaatatttcctgccagcagaggtgtgaagaaagaaaaaagaattatttatcttcgaagcatcttcctcttcttttttgttcccatattacaagtttttatgaacctcaggaaatggatttcctctaaaaacgtgttttttaatagatatcctcattttcttatatcctatcagaattgaaaggaataaaatccatgttttccccgtgtattaataaattacccataatcattgttcaacttttgttttctacccttctagacattttgtgcgtatatgtacacatatgtgagtagtaaatgagcacttaattagaataatagacctttctcattagtatgagttcttttacttcctgtaaacaagcacactaaaaactttaattttttcagatggactgagctgtgtccaatgattgaagccaggaagaatcatgggctggtatttgtaaaagacaagatatttgctgtgggtggtcagaatggtttaggtatgtgatgttaattcactgttccactttcctgatgagtttgctgatacttccttaaattattgaagcatttttaaaaatctagatagaagcatttaccatgtatattattatatctatttttatagtttctgggaattaacatacttgataaaatatcgcaggatgttaaacattcctgtttatgaaatgtcgcagtagtcaccagtcattgtgacaattttagatggctcctatacattcccagatacctcctggggaatgatgtcgcaccagcttaagaactattgagcaatagaaatatttgaactttaaaaaacctttaaaaactttttaaatacaagttttaaggcttgtatccaggtcctaaatggtaaagtttcctaaatatttttaaacattgcatgaaaatatcaatattgtaatttttaaatgactaaatttggcattttgttttcataaataatgtactaaagaatcttaaataattgtcttaaatgaaagggagtcggaactgaatctagacacaagcttcaatttagtcagtactttaagcatcacttaagtgtaccagtaacttcttttccttcttctgtccctgtccattgctattttccataaagtgctaaaaggaggaaaaagaaggacatttgagtaattataatcaaagttaatcagaggggaaatcaccgattggtttattttgcatttttccagaatagataaaacatgtttaattttgtagaaaaaaatcaatatttaaaaagaaatattaaatgtctattgtgttaagagtaagaatttaggtggtggctatgtggacattcactgtaaaattattacagtttttctgtgtgtttgacatttttcacaataaaatattggaaaaatacaaaaagttattactttaagaaaccttagaattgttgatatagtttttcatgttgttcatgttttattcttttgaaggtggtctggacaatgtggaatattacgatattaagttgaacgaatggaagatggtctcaccaatgccatggaagggtgtaacagtgaaatgtgcagcagttggctctatagtttatgtcttggctggttttcagggtgttggtcgattaggacacattctcgaatataataccgaaacagacaaatgggttgccaactccaaagttcgtgcttttccagtcacaagttgtttaatttgtgttgtcgatacttgtggagcaaatgaagagacccttgaaacatgaaaaatgagtggacttcagactcatcagagactctaaaatatagccaccagtgctttgttccaggagtttggtgacaaagttttggtttggtgttttggtaaagaaagtttcaagtgaaatgaggttcctataaaatagatgtttcttttatatggatttccttaattcaaagatcatattttagctggccacaaaaccaagaacatatctagcaagaaaacttgaaaaagtataagcatttgttaaaaatgtgaatttcttgaatgaatttcacatttgtaactatgattttggcagaatagaagattggctcatcagtgaagcgcagtatcttagctctagattctattttcatgcatcacagaagtgctatacggttaggtctgtttgtgctcagtcaagaactaagaaatagtatgaattgtaagtcaagatgggcaactcagatggagcagcttagtctcacagtttgcttgtctatttattttatttagtgccaaatgtattccattttaaaagtaagccagagtgagtcaaggcatatacacactttctcacaaaacttcctaaacagatttgggggtttaatatgtccaactcctcatgaaatatattcaatccacttaaatatattccatctttttaacataaaatgtaaagcttagcacccatcattaatttatgtctctgttttatccagtggttaaaaaaggattctgcctctttagtcctcactgttaaataaaacccaatcatagtaagtgattaactagcaaaaagtaaagctatttatagcaaatttctagatcattagaaaagcactggtagttgtacaatatcagtgttgactttgaacttctttaacgagatcatgaattcttttcccttagccaaaacatgaaatatttaacctagttgtctctaaaagttttgtaatcatgagttagatatatgtcatctcctattcattgcttttatgtgatcaataaatcttttacaaacccaactactcatttccttcctagtaatactttgcctttttcactgtgtatggaatgaaacatgtaaagctgtcacaatcaatgtttttatctgataatattaaatattttttaacttaaaatag

SEQ ID NO: 290 - DNA, 2636 bp, Homo sapiens
gttcaacttttgttttctacccttctagacattttgtgcgtatatgtacacatatgtgagtagtaaatgagcacttaattagaataatagacctttctcattagtatgagttcttttacttcctgtaaacaagcacactaaaaactttaattttttcagatggactgagctgtgtccaatgattgaagccaggaagaatcatgggctggtatttgtaaaagacaagatatttgctgtgggtggtcagaatggtttaggtatgtgatgttaattcactgttccactttcctgatgagtttgctgatacttccttaaattattgaagcatttttaaaaatctagatagaagcatttaccatgtatattattatatctatttttatagtttctgggaattaacatacttgataaaatatcgcaggatgttaaacattcctgtttatgaaatgtcgcagtagtcaccagtcattgtgacaattttagatggctcctatacattcccagatacctcctggggaatgatgtcacaccagcttaagaactattgagcaatagaaatatttgaactttaaaaaacctttaaaaactttttaaatacaagttttaaggcttgtatccaggtcctaaatggtaaagtttcctaaatatttttaaacattgcatgaaaatatcaatattgtaatttttaaatgactaaatttggcattttgttttcataaataatgtactaaagaatcttaaataattgtcttaaatgaaagggagtcggaactgaatctagacacaagcttcaatttagtcagtactttaagcatcacttaagtgtaccagtaacttcttttccttcttctgtccctgtccattgctattttccataaagtgctaaaaggaggaaaaagaaggacatttgagtaattataatcaaagttaatcagaggggaaatcaccgattggtttattttgcatttttccagaatagataaaacatgtttaattttgtagaaaaaaatcaatatttaaaaagaaatattaaatgtctattgtgttaagagtaagaatttaggtggtggctatgtggacattcactgtaaaattattacagtttttctgtgtgtttgacatttttcacaataaaatattggaaaaatacaaaaagttattactttaagaaaccttagaattgttgatatagtttttcatgttgttcatgttttattcttttgaaggtggtctggacaatgtggaatattacgatattaagttgaacgaatggaagatggtctcaccaatgccatggaagggtgtaacagtgaaatgtgcagcagttggctctatagtttatgtcttggctggttttcagggtgttggtcgattaggacacattctcgaatataataccgaaacagacaaatgggttgccaactccaaagttcgtgcttttccagtcacaagttgtttaatttgtgttgtcgatacttgtggagcaaatgaagagacccttgaaacatgaaaaatgagtggacttcagactcatcagagactctaaaatatagccaccagtgctttgttccaggagtttggtgacaaagttttggtttggtgttttggtaaagaaagtttcaagtgaaatgaggttcctataaaatagatgtttcttttatatggatttccttaattcaaagatcatattttagctggccacaaaaccaagaacatatctagcaagaaaacttgaaaaagtataagcatttgttaaaaatgtgaatttcttgaatgaatttcacatttgtaactatgattttggcagaatagaagattggctcatcagtgaagcgcagtatcttagctctagattctattttcatgcatcacagaagtgctatacggttaggtctgtttgtgctcagtcaagaactaagaaatagtatgaattgtaagtcaagatgggcaactcagatggagcagcttagtctcacagtttgcttgtctatttattttatttagtgccaaatgtattccattttaaaagtaagccagagtgagtcaaggcatatacacactttctcacaaaacttcctaaacagatttgggggtttaatatgtccaactcctcatgaaatatattcaatccacttaaatatattccatctttttaacataaaatgtaaagcttagcacccatcattaatttatgtctctgttttatccagtggttaaaaaaggattctgcctctttagtcctcactgttaaataaaacccaatcatagtaagtgattaactagcaaaaggtaaagctatttatagcaaatttctagatcattagaaaagcactggtagttgtacaatatcagtgttgactttgaacttctttaacgagatcatgaattcttttcccttagccaaaacatgaaatatttaacctagttgtctctaaaagttttgtaatcatgagttagatatatgtcatctcctattcattgcttttatgtgatcaataaatcttttacaaacccaactactcatttccttcctagtaatactttgcctttttcactgtgtatggaatgaaacatgtaaagctgtcacaatcaatgtttttatctgataatattaaatattttttaacttaaaatag

SEQ ID NO: 291 - DNA, 546 bp, Homo sapiens
ggcatatcacagcagaggcaagaaaggctgactaggaccaaggaaaataggactttatacatggatgtgtccacatgtgtacgtgtgtataatgagagatatatcaaaatttaagaaatccttctacccatatcttttccaggctttccaattttccgcatttcacatctcagcacctaagtataagaacttgcatggaatagatactcagtaaaacttaagtgaattaaatcatatttttagggtaacagctccctgaccctgcccacacacatataccgtcccatctgtgactctactgttatttgtccatcttcttgctaacatgagaactgcatattcctctagatttccctgtagatttccctattgcagggagcaataaatagcactgccttcacctgcaagcccaggttggaactagtttcatcactagggtaatgcccaacagtcatagccactgagctgacaagactgacttcccatctattcttccccaccccaccccccgccaactacatacagtatctaggtactataatcagc

SEQ ID NO: 292 - DNA, 282 bp, Homo sapiens
aattgttttttgttttttgagacatagtctcactctgtcgcccaggctgcagtgcagtggcgtgatctcagctcactgcaacctccgcctcctgggttcacgccattctcctgcctcagcctcctgagtagctgggactacaggcgcctgccaccacgcctggctaattttttgtatttttaatagagacggggtttcaccgtgttagccaggatggtctcgatcgcctgacctcatgatccgcctgcctcggcctcccaacgtggtgggattacaggcgtg

SEQ ID NO: 293 - DNA, 4813 bp, Homo sapiens
gcgcggttgtgagtagtaccgggagtggggtgatcccgggctaggggagcgcggcggccgcgatcgggcttagtcggagctccgaagggagtgactaggacacccgggtgggctacttttcttccggtgcttttgctttttttttcctttgggctcgggctgagtgtcgcccactgagcaaagattccctcgtaaaacccagagcgaccctcccgtcaattgttgggctcgggagtgtcgcggtgccccgagcgcgccgggcgcggaggcaaagggagcggagccggccgcggacggggcccggagcttgcctgcctccctcgctcgccccagcgggttcgctcgcgtagagcgcagggcgcgcgcgatgaaggcggtgagcccggtgcgcccctcgggccgcaaggcgccgtcgggctgcggcggcggggagctggcgctgcgctgcctggccgagcacggccacagcctgggtggctccgcagccgcggcggcggcggcggcggcagcgcgctgtaaggcggccgaggcggcggccgacgagccggcgctgtgcctgcagtgcgatatgaacgactgctatagccgcctgcggaggctggtgcccaccatcccgcccaacaagaaagtcagcaaagtggagatcctgcagcacgttatcgactacatcctggacctgcagctggcgctggagacgcacccggccctgctgaggcagccaccaccgcccgcgccgccacaccacccggccgggacctgtccagccgcgccgccgcggaccccgctcactgcgctcaacaccgacccggtgagaggccgggcgccggccgtgggcggacgccgcgggggatgggaggttggtggcgtggtggcgggacgcgggcgctcaccgtcctccgggcaggggcgggccaggaatgacagccccctccccctgctcctccgggctcccccgggccgccagcagccggccgggctcggcgagcgcgggtccgggagaacgcgcagggcgggactcggggctgtgggcgccctgggctgtcaagtcccgcctgagcccggaggggcccccccggctacaggctggggtgggggcgtcggcgcgccagcctgatttccgaggacaatccaggaccgtgtcgagcgcgttgtttgcgcctgctaacctttcccttggtgttcggttgctgttccaggccggcgcggtgaacaagcagggcgacagcattctgtgccgctgagccgcgctgtccaggtgagcgcgcatttcccgtctcgggtggccggtcaccagagacgcccgtccccgagggcttccggggccaggcaccgcggtgttctttgcccccagcgtttctgagagcaaactcccaaggaagtaaatcccctctctccctgccacctaagtagcaagtaaacccgtacttagccttagaactcgaggttcagtctcggtggagacgggtcagcccttgtccccgccgtccccgtgttttttctggtggtcagcgggctcttctgccttccctagttcccgagggagggcaccctcgtgggcatgggagctgccccggtgtcctcccgtgcagtctgtcacccacaaagggggacgcgggcagggcgccggagtgggtcccctctccgggcttcccgagggccgcagctgcctgctcggcgcctggcccggccgcgggcgggtgttgtctgacctggtggtttgttttgggttgttgatcaagcatgtcttgagtttggtcggtggcgccagttagtctgcagcgagaaggttcacacaccccctctattcattcctcttccacaggtgtgcggccgcctgagcccgagccaggagcactagagagggagggggaagagcagaagttagagaaaaaaagccaccggaggaaaggaaaaaacatcggccaacctagaaacgttttcattcgtcattccaagagagagagaggaaagaaaaatacaactttcattctttctttgcacgttcataaacattctacatacgtattctcttttgtctcttcatttataactgctgtgaattgtacatttctgtgttttttggaggtgcagttaaacttttaagcttaagtgtgacaggactgataaatagaagatcaagagtagatccgactttagaagcctactttgtgaccaaggagctcaatttttgttttgaagctttactaatctaccagagcattgtagatattttttttttacatctattgtttaaaatagatgattataacggggcagagaactttcttttctctgcaagaatgttacatattgtatagataaatgagtgacatttcataccatgtatatatagagatgttctataagtgtgagaaagtatatgctttaatagatactgtaattataagatatttttaattaaatatttttttgtaaatattatgtgtgtgtttttttttaatctatgggaatatttcttttggaaaatcatttttcagctcaattacagagctcttgatatcttgaatgtcttttctgtttggcctggctcttaatttgcttttgttttgcccagtatagactcggaagtaacagttatagctagtggtcttgcatgattgcatgagatgtttaatcacaaattaaacttgttctgagtccattcaaatgtgtttttttaaatgtagattgaaatctttgtatttgaagcatacatgttgaaaatacaccttatcagtttttaagtacagggttttatagtgtaatatatacagagtaagtgtttgtttttgtttttcaactgaggtcaaaatggattctgaatgattttgcatatgggatgaggaaatgcttggatccttaaggagtttacgaaatctgctgttttatcaaagtgaaaaaaaattgcttattactcttcattttacactaaagcttaatgtcactaagtttcatgtctgtacagattatttaaatcatggaaatgaaaaaaatgttctctgcttgctaccaaaggacaaactcttggaaatgaacactttctgctttccttcctccaaagaattaataggcaacagtgggagaaaaaaaaggcataatggcaaatccttcaagcagggataaaagtcgatcttcaaacattaacttaagcagaccaaaaattctgatgaccgcatctagattatttttttataaaaatgattttcactatagctatgttacgctaagctactgtccaatctcttgtgatgtgtaacttttacatgtgaatattaaagtagatttctctgtcttgtactgtgatttctggtctcatttctttaaaaccttactcttatttttcttttaaggctcttttttctccttaaggaaggtaatattttctaggttagataggactatcagggtttgtgaacattatgcatttaatgttatgggtactttacacacaagttagatggaatttttagagtgaaagaattaagtaggatttaattgggtgctttgtaaatagtcaactgtgtgtataacgtggtctgtttgatttttaaaaggaaaggatttgtttcagattatacaagaataaaagtattatagacccaagggacttcttatgaggtcaaattcagatatttatatgaatatgaaataccatggtccctagtagtcagttgaagtggcaatgtctaaacagaaatgaacaaaactaatgctagcaggttaaaatcaatcaaaatgtttaaaaattgattctgtcctcagcatgttatttcctcagctctgataatttactggtcttgagtattttgagaatttgatgttgaacgttataaagtcaaagaactgcttgtttagatgaggtttatttttatttttgatattattcattcttgtcacacatcaagaagaaaacactagagtgctgctggaattccaaatctgaagaattctaacgactgcattctttgttattaaaaagggcacaatccttcctttttatttggcagtttaatttcagtaggaagcatgtcacatgtgcactgttggttagaattatgcatctgtcatgcctgactgctgaaccctacctaagccttttggcgcagtttaaaacttatactggtggactgtgaacctcaaaacaaatgggtatttttgggttttgaggatagatgttactccttaaagtttgtatttggggcatgaaaaactactgaaagaagaaaagtgctacagatactacatttcaaagagttggcattttccctttggccactcaagcagcatttgatgtatctaaagaaacaaagtcattgtttattttttaaaaaattatatgcagttgtacaagatactacattccattgaaatgttggctatgtcctaaccaggcaaccagataacaaaaacattttgagtcttttatctaggtagttctaattattcagctacttagtttaacaaaggaaaatatcctgacttctctcatttcatttgtagacttttcattgtataggcacaaccaaagagtcagactggtttaaaactccagaaggaaaaaaagtatcccacacagtggatgttgtttctaagaatgctacaaaatcctgacatctcagacatctcaatgttaaaggaagaaaaaaaataccttttcatttcaaagaactaatatactttgatattgtgtaaaccttactcaagtttattgtcaagctttaactgcctttttagaactttttaaaatttcgagcccacaaatctattgtattagttgccttctataacaataaatcttcactgagcaaaaggc

SEQ ID NO: 294 - DNA, 509 bp, Homo sapiens
ttgctaagctttagcattttttaaaaagaaaacggaaaggctacacattccattccatcattatggtttcggcaaatgtgaaaaggcgaataatgaaacggaggagggaaatatagaacagaatgaacgtgccttcttgaacagcgcgtctttcttaaggcactggaatcccacggatggagtgatgggtggcggagggtccctgggcgccgtgctattaggagtggcagggtatccgcgagcagggcccaggcgctccctcagcagcctagtcgggataaggggggcggtggagagtgaattccggccgcacattcccgcagttcttcgcaggaacttcgctctctcttttcccctcccttgggcacacatcagcctggcccgactcccactcagctctcttttctcagaaccccgacccacagcgttgacggaatggagtgcccttcccattggcccgagcgtcattccccgaggtggcactgcccgcctgattggctggccactcc

SEQ ID NO: 295 - DNA, 2263 bp, Homo sapiens
tccattctttcttaaccatcttcttctgcccccatctttaaaaaaaaaaggcagtaggctttatggctctaaaatcaaatgcttatgttggattctaataagggggttttatttcaggtatttgtaggcaaaataccaagggatttatatgaggatgagttggtgcccctttttgagaaggccggacccatttgggatctacgtcttatgatggatccactgtccggtcagaatagagggtatgcatttatcaccttctgtggaaaggaagctgcacaggaagccgtgaaactggtatgtgataattatccactgtcttagcaagtcactatttgaggaaataaactttaattcaaaaatgtttgtagttaacattattttgatttcttcagttgttgcttggaatgtttttatactgaccaagttggtatgtgacgtttatttttctctgactataaaagtaaaaaagaactgaaaatacccaaaaagtaatgttttatagaaagtctcccattgatttaagaagttatctattagattgatatcagaagtttcatatgagtatttggcttatgcatttctgtcttttggttttaggcaaaaggatgtcaattcttgatgttaaactttaggattcttaaagtataatgaagactggaatgggctgtggggaacataatagtggatgacagtgacttaggattcaattcagaaaatagttgtgaatctgttttattttggttacagcctactcatacgatttatttcatattttctaagtgtatttttgttcttcctgtatgtttcttggcccttgagtcttctctgtctttaatctttctctcctctcctactatttatagccagtctcatattaatttcctttctctagggcctttaaccacttggtgctcatttcagaccagtagtagtagcaacaaagttctgcaaatcaaatgtatcttcactcctgctgtatttaagacacagctatctcagtatcttaaaataacaatgtaattattttttggcatacccttgcctgacttctgaggacctcactaagtctagttctagcctttgtagaatggtcaacttctttcatcaaggctttggtttcattactggtgtctgaattagttccactcctagcttgacccagattttagtttttattatggattttttcttcaaacttgtttatttaatattaagttttcatttttggcagcatatggatgattttatttttaataatcatatctcttagtaaactaatggttaaataatattaaagtataagaagctaaaattggccaggtgtggtggctcacgcctgtaatcccagcactttgggaggctgaggcaggcagatcacctgaggtcaggagttcaagatcagcctggccaacgtggtgaaaccctgtctttactaaaaatacaaaaattagctgggcgtggtggcgcatgcctgtagtcccagctacttgggaggctgaggcaggagaatcacttcaacccaggaggtggaggttgcagtgagcaaagatcatgctactgccctccagcttggatgacagagcgagactccatcttaagaaaaaaaaaaaagggctacaatttatcaagaaaatccactatagtgatttaaataaaacatttttcaaaattttataaaattttgaaagtattgtgtttggtagacaatttaaaactatatatttagaattctgtgacttctgtagaatttgaaatttttctaatatctttgcattgattaaacatagttgttaccctttacatattgttattttgagtatggcttacctatatgcaattacatttccaaggaccctgaatgatcagtctcaggtatttttttctgaaaaatctgtggaaaaacattttcagatagataaaattaaaatatgaaataagatattttaaacaataaagtgagtcctttttatatggaagagtagtgaaggttaacaaaaccaaactaaaacaagagactgtaacaatgaagtttaaaatatacattcatattatggaaagcatgagggaacttggtgagttgatgaagcagggagcgtttggccttaaattgttgaattttttagattaagatcaattgtcctgagtttggggtggttttggggtctctggttcttttcttattgcagtgtgacagctatgaaattcgccctggtaaacaccttggagtgtgcatttctgtggcaaacaacagactttttgttgg

SEQ ID NO: 296 - DNA, 14327 bp, Homo sapiens
tccattctttcttaaccatcttcttctgcccccatctttaaaaaaaaaaggcagtaggctttatggctctaaaatcaaatgcttatgttggattctaataagggggttttatttcaggtatttgtaggcaaaataccaagggatttatatgaggatgagttggtgcccctttttgagaaggccggacccatttgggatctacgtcttatgatggatccactgtccggtcagaatagagggtatgcatttatcaccttctgtggaaaggaagctgcacaggaagccgtgaaactggtatgtgataattatccactgtcttagcaagtcactatttgaggaaataaactttaattcaaaaatgtttgtagttaacattattttgatttcttcagttgttgcttggaatgtttttatactgaccaagttggtatgtgacgtttatttttctctgactataaaagtaaaaaagaactgaaaatacccaaaaagtaatgttttatagaaagtctcccattgatttaagaagttatctattagattgatatcagaagtttcatatgagtatttggcttatgcatttctgtcttttggttttaggcaaaaggatgtcaattcttgatgttaaactttaggattcttaaagtataatgaagactggaatgggctgtggggaacataatagtggatgacagtgacttaggattcaattcagaaaatagttgtgaatctgttttattttggttacagcctactcatacgatttatttcatattttctaagtgtatttttgttcttcctgtatgtttcttggcccttgagtcttctctgtctttaatctttctctcctctcctactatttatagccagtctcatattaatttcctttctctagggcctttaaccacttggtgctcatttcagaccagtagtagtagcaacaaagttctgcaaatcaaatgtatcttcactcctgctgtatttaagacacagctatctcagtatcttaaaataacaatgtaattattttttggcatacccttgcctgacttctgaggacctcactaagtctagttctagcctttgtagaatggtcaacttctttcatcaaggctttggtttcattactggtgtctgaattagttccactcctagcttgacccagattttagtttttattatggattttttcttcaaacttgtttatttaatattaagttttcatttttggcagcatatggatgattttatttttaataatcatatctcttagtaaactaatggttaaataatattaaagtataagaagctaaaattggccaggtgtggtggctcacgcctgtaatcccagcactttgggaggctgaggcaggcagatcacctgaggtcaggagttcaagatcagcctggccaacgtggtgaaaccctgtctttactaaaaatacaaaaattagctgggcgtggtggcgcacgcctgtagtcccagctacttgggaggctgaggcaggagaatcacttcaacccaggaggtggaggttgcagtgagcaaagatcatgctactgccctccagcttggatgacagagcgagactccatcttaagaaaaaaaaaaaagggctacaatttatcaagaaaatccactatagtgatttaaataaaacatttttcaaaattttataaaattttgaaagtattgtgtttggtagacaatttaaaactatatatttagaattctgtgacttctgtagaatttgaaatttttctaatatctttgcattgattaaacatagttgttaccctttacatattgttattttgagtatggcttacctatatgcaattacatttccaaggaccctgaatgatcagtctcaggtatttttttctgaaaaatctgtggaaaaacattttcagatagataaaattaaaatatgaaataagatattttaaacaataaagtgagtcctttttatatggaagagtagtgaaggttaacaaaaccaaactaaaacaagagactgtaacaatgaagtttaaaatatacattcatattatggaaagcatgagggaacttggtgagttgatgaagcagggagcgtttggccttaaattgttgaattttttagattaagatcaattgtcctgagtttggggtggttttggggtctctggttcttttcttattgcagtgtgacagctatgaaattcgccctggtaaacaccttggagtgtgcatttctgtggcaaacaacagactttttgttggatccattccgaagaataagactaaagaaaacattttggaagaattcagtaaagtcacaggtaaaacaaaaatgtatttagaaattacttttgcgaaatatgttgtactacttacaagtgctcaaaaaaactgaggggttgtatgtattaaattaagaattcaggtctgaagtatctaaattgcttcctttctgctttatagtggtttgggtttaagcaagttcccttatatccttcatttcttggaatgtccccttcacttctttgtcttaattgaaccttggcttttgctggagcttttgctctatagccctcaagtgaatgctttttttccccttgacaattagtgtattttaggaccaagaggatgaaagtttttactctctccctgctgccttgtctagatcagattttttttttttttgagacggagtttcgctcttgttgcctaggctggagtgcaatggtacgatctcggctcactgcaacctccgcctccttggttcaagcaattctcctgcctcagcctcccgagtagctgggactagcatgtgccaccacgcctggctaattttgtatttttagtagagacggggtttctctatgttggtcaggctagtctagaactcccgacctctggtgatcctcccgcctcggcctcccaaagtgctgggattacaggcgtgagccacagtgcctggctgatcagatttttttaaatatccaattctaaatccatggaattgattgagaagtagattttatatcacagttctatacacatttatatataactgaaacaatttaacaaaactgtacttttatttattatacatgatttattttgatatttcttattctatttcattttttaaaatgccaattgtgatctaatactacctatgatttaaaaacactgcgttagaccgctgcctccccttgtaaaaaccactgtttctttacatttttatcatccagacatatcctttcccttttgttgaagctgtcattcgttgctcttgtggtttcagcctttcattaatctaaagattgcttctggctcactgtcttcctcttctgccctaaattggcttctttctaatacctttaacatctacattggtgaaccatccagggctttagactcctacctacttctatgtctacctcatctttagtcctttacttcagctccaccatatccagattacattctggatctagtcaccagaaattctatgcactctgaactcttgatttctagcgtcccactttgtaaccactgctaccacccgctatattgtgttgtcaagtattgtgttgtcaactgctggcacagttctttgacctcatcactttattatctatagctccttctggcttcatgatcatttattcattctttcagcaggtgtttattaaagttcctgttaagtgctggcattgtgctatgtgcctgggatacactgatggctaagagacatattctctgctttcatagatcctatatcctgagaaaggagataagaccaagaatataaaaaataaaaattaaaggaatatttagacattgtgataagacactgaagcaggaaatacaggatatttagctagagaatagctactatccctgtttccatggttttggaagacttttctgataagatgacatgtcaaccagcacctgaaggatgaagaggttgtagcatacaaagagcaaaaggaagtgcattccaagacagcaacacgtgccaaggttccaaggcaagaaagaagtcagtatattacagtaactgaggaggccagtattattaaaaggtagaattaggagtagagttgtatgaaatgaagtaggcagggcttctgtaggccatgtaaggagttgggtttttattgtatatataatgagaaggtatttaaaggttttaagcaggaaataacacctatttcttgtttatgggatattattcctagcgctctgtggataggggcttggagagaaggggtgtgagtggaagctgataaattagttgaagctgtcatactagtacagatacaggattagactagggtaatagcagtggagatagaaagaagtaaatgagtttggaattggataggagagatgaaggaagaaatcaagaatggctaaccaatttctggcttcagaaccaggtggatggcactgtttattagataggaagtctagggaaggcagattttggccatggtggttcagttttggaaaagttaaatttgcaatgtctaagacatcaaagaggatacatcgggtaagaacgtaggcacatctagagcttagagaagtctggggtaggaaaaaaatctaagtatttataagggtataggtaacatttaaaagtagggctagctgacattatttagaaagaacacatacggagagataagggcaaaggactaagaccagaggaacactaatatttagtgatcacttccattcttggtaaaaatagtaacttttaagttagcttcaaggaagatttttggccatgattagttgtcaaaagttagttctcttgggtttatattactaattttgtttttaagatccttgttagtgctttaataaagtcatgttatatcaaacgctctaaaacattgtagcatgttaaatgtcagaatatagtagatttgttgtatatggctgtaccttcagaacccctaaaattaaaaaggaacatcaaatactgtcccaaaccccatatctaattatgttgatctaattgtctacaaaattagtgactcatgttgaggctgcttcacttatattttgctcatcgtcaagtggatttaggtctgcctaatcgctagatgtgtggtggatgcttttggcttatatatctggctgttggtttaacagagggtttggtggacgttattctctatcatcaacccgatgacaaaaagaagaatcgggggttctgcttccttgaatatgaggatcacaagtcagcagcacaagccagacgccggctgatgagtggaaaagtaaaagtgtggggaaatgtagttacagttgaatgggctgaccctgtggaagaaccagatccagaagtcatggctaaggtaaatacagttgcttggaatgggcatagggtcatcatttaaattttgtactcagaataaagctcaaatattttgagttttatgataaatagaaattgtagctttagacttcaactgtttggcaaggagcggctttaacactaaagttaacagcctgtcttggtatccaggaatttccattaacaatcccttttcctgcagattaaatgtgcaaaaggaactgaaatgaaattccttcaattaagtagtcccatacacactgggtgtttgtttagtgctaggcactgtgagggatagaggttttttttttttttaaaagtcctgagtaaagagagaagtaatgttttggagattataagttataatcttcattgactatattatgactttattacttggccatgaattatgttttatttagatttatagctaatttttctttttttaagctttttttgtagtttttatttttaaaaatattttatttattattattattttttgagacagagtcttgctgtgttgcccaggctggagtgcagtggtacgatctcggctcactgcaacctccacctcccaggttcaagcgattctccttcctcagcctcccaagtagctgggactacaggcgcctgccaccatgcccggctaaattttgtatttttagtagagacagcatttcaccatattgcaggctggtctcgaactcctaagctcatgatctacccgccttggcctcccaaagtgctgggattaaggcatgagccaccgtgccccgcctcttgtttttaaatgatcagattcccttagtgtattgtccccatgaagaaaggcaaaagattgtcatgtttgctcttatttgttagtggcaaaatatgcatggcaagtcctgtaaagggccctcaattccctcctgattcctgtacttgcgttgccaggatcttaatagtggtgccttgagtactggttcttaagttttcctttgggcgactcctgggacacatcagagttgcatttctttttttttgagatggagtcttgctttgtcccaggctggagtgcagtggcgcgatctccactcacggcaagctctgcctcctgggttcacgccattctcctgcctcagcctcccaagtagctgggactacaggtgcccgccaccacagctggctaattttttgtatttttagtagagacggggtttcaccatgttagccagggtggtgtccatctcctgaccctgtgaaccgcccgcctcggcctcccaaagtgctggggttacaggtgtgagccactgcgcccggcctcagagttgcatttctgctgcttgcaatgagctcttgagcattttagttgtctcttcccttcacagggaggcagcaactctgaatggccatgagttaatggttggattcttcttgataagtcagaagtcaaggtttttattccagaatttgaggaggcaaaccctcgttctaagtagtttggaggagaactctggtttatacttgtataaagtctgggttggcagtgacatctttgggttaatcagataagttctattcagaatgaaccagagaggctctcagaagtgctactcagtatcttttatctcatattccttgagtagatgggtgtctaggaaagggatagagaatttaaatagctctgagtttttattttgattttttactagcttgattttaattcctattgtttcttctcctaatacaactatgactttgggtaaactactgaacatgaatgtcatctattttattgagcctggatcaatctctaagatccaccacaactttgaatctacctgtagtaactaagtatagcctgtattactttttctgtaaaaatattttaaaatagtattatagatgtattataatagaggaataaaatattataaaagaggaataaaatcccatgaaaaccaaaagtatagcttgtaatttgcttaccagccacttctcacataacctttagtaactgctcagatggaagttcatcctaatctttttttagggttagaaaacttcaagatttcattctggtaactcctttttcctagatctaaaacaggtttcagaatgaaaaggaggtctctataaacttaggattaaatattatggagccctttattgtttcttttttttaaaagatggggtctcatgttgcccaggctggagtgcagtagctgcccacatgtgcagtcatagcacactgcagccttgaactcctgggcttaagcgtccctcctgcttcagcctcccgggtgcttgcaaccccatccagctcctttattgtttcctaattgaaaagaaaagtttatccatttgagtaaagcttctgttattcacactatcaatttacaattcactgaagattttttttgccaagttgggtcagttttacaatgtaccataacctaaaagcctaaatatatgtctcttaaagggaccctttttcctgttgaacattttaaacacaatttcagtaagtaattttcacatagtatgttatcgtttcatcatagaaaagtccatgttgaattttttttaaaaagcaactaaaccagtgggagtctgtgtaacatagaggctggaccttagtatgacaaattgagaataataaaggggatggagcgtttgtggaaaatgttagtttttttcctccttaaattagtatcttcttattagatagccctttatctgaagcaacaatttgttcaatatgttagttttttatttggataggtactatgttttcttagttcaaaagttatatagaaaagtatagacaaagaaatttcctttctacccctatccctgtgtctaccaaatcccctttgtctcctataaggcatccagttttaatagttgctggtttccttttagtatttccttcggcaaatatggatatacttccttaattcttagatgagtggtagtaatgttggtagcctaccatatccactgatctaccttttgtttattcaccatcctgtttcatcagctctgaggaaatacatcattactatatgtactactaaatagttaaaaaacactgccaactaaactatggcacagtacttgcttatcacattgactgtaagttgtcctatcctacaactcatagagctcctcttcattttttgggtttttgttttttttttttttttttttttttttgagacggagccttgctctgtcacccaggctggagtgcagtggtgtaatcttggctcactgcagcctctgcctcccgggttcaagtgattctcctgcctcagcttcccgagtagctggggttataggtgcctcctaccacgcccggctaatttttgtatttttagtagagacagggtttcaccatgctggccaggctggtcttgaactcccaacctcaggtgatctgcccacctcggcctcccaaagtgctgggattacaggcgtgagccaccgcgcccagccctcttcttcattttttatgactacatagtagtctattctgtggaggtactatagtgtatttaaccagctggatattgtttctaatcttttgctcttacagtgctggaaggaataagcttatgttagttgatacaagtggagatatatctgtaggatagattcttaggggtagaattgtgggccaaagggtagatatatctgtaattgttaagatactgccatattcctttctgtaggagatacactattttacattcctaccagcaaaatacaagagaattattttcctcattcttgacaaaatagtgtataatcaaacttttgaattttgccagcctgataacaaatgtctcagtgccattaatgattaatgatttgcttctcttactatgaatggtttgaactttaaatatattttaagagccatatgtgtttctgtgtatgaaccatgtattcaggaattttgcctatttttctattcagttgttgagctttttgttattttctggtgctctgatataaaagagagattagctgtttgtgatacatgttgcaaatttttcatccatatttattgtctttgcttatagtatttttttgccatatagaagtcatttatttttagtagttgagtataacattcttatggctcctagattttaagtcataaggtcatccccactccagtgttatataaaggaatcattcttgttctaaaatttcacagtcctccctccacccttttattatttaaattttcaatctatttggagtttatccttgtgtatagtgtaaggcatggaccagcttttctcctttttttctaatttaacactacctgatttaatgatttaagcattatagtttgtttatatttggtagggccagcctctaaatttcactcttttttttcctggttattcttgcttatttattttttcatatgaacttttgaaagttactcagttttagaggaaagaaacagaaaaacttgttttgaaagggactttttgttgattaacttggtaataataattatgtgttggttccttgaaggttctactcagtgttaggtgctttaatgacaacataggagaaggcaggaaccaataatttttgtaaattggtgactgatatcagtgtcattttcctagcaatttctcttactacctgtaacaacacttttagcacttaatgttttagaggagaaaagctatgctatgaagacaggaagaaacacttttcaggtaaaattaagtagccaatgacggttttgtttatttgttgcttactaggtaaaagttttgtttgtgagaaacttggctactacggtgacagaagaaatattggaaaagtcattttctgaatttggaaaactcgaaagagtaaagaagttgaaagattatgcatttgttcattttgaagacagaggagcagctgttaaggtaggaattttgaaattttggttcttgatatttgaattttgtttttgaaacttgccaaacgcaaagtaactttaaaaactgaaacaatattggttgtcagcttttgctgaactctttctatttaatctctgtaaagtggtaatagtatgtaacagataagactccatatttcaaagccaggttattactgagtttgtgatcttaggcaagttatttttaatctctgtattgttttgtaagattcgatagcatgatgccttggaagtattacaaggtataaaaattagctgctgtaaacactgaataggtaatgaatgcattataactacttagttgacctcagtttgtgtacctatgaaggaaactgagtggtgtacatgactcatacagtataccatgtttaattgagtagatagattttgagggtatgattagttttacctttatttaatcattttagagttaaaatagcattcactatgttttactgatttcggtaattgttagagatatcacttgtgtataatagttgatttagtctttgatgataatgaaaagtttgaagaaagtattttcatatggtatctggaacacaaaacctgctttctatcgacaatggtttaggactatctttaatgggtgaaattttcagtttcttttttttattcatctctccttccttgggggggtgggagcaagacaaaacactactaaaatcttatttatgttattaggaagatagatccagaatgcttagtgacacaggcatggttctttttctgcatgtttggtcggtgggatactgccatctctaatctgagcattttttggttttgttttttgcccaggctactgcttttaaaacaggctttatagaatccctgattggtttataattaattggcttgctcattgatggtagctaattaatgaggcagtattgttcataaaattcataacttgtccaagatcacaaactcagtaataatctggctttgaagtatggagtcttatctgttatgctgttatactcttatccgttcatttgtggcttctgaaatttcactggtatagaatgcagataactaataattttatgctgtctaaatattcctcctgactcgactggtttcaaataactggttgtcctgattgaaaatatttataggatggtttgccaaagaagcctatgaaattataaaatatctagtccaggaactgggagtcaccaggatggtcagggcagagggtagatgtttcattttttaatttatgccaggaagcttttgtaaacttgtttagttgctttaactgaagcaacgcaaagctgaggtggtaaaagggaaaattgcagtcttgaggactagtttcgtttttgtctagatacttataaatcactgatagctccaatagaacatttttttatgtgtgcccagagtggggaaaggtatagggaaacaaaaaataaaatatcatgaggaggtgacattttgttactgagtacctgaaccttttgatgtatggcagaggttgttaggtggaacaacgtgaacaaagggctagaacatggaatgtttgattactgctttctacataattgcttgagtcttcattagtccaggccttttctggctctgtacttttaactgttcaagcaaagtacattttgggttaagcattgtgagggaaacctaggcttttttgtgttagtatcttcttgaattttacagataatctcactcagtaacctcatttgtgcttcaaatccttgaaattgtcgtataagaacagtggaagacctgtatgttgtatgctacatgtttattttaaaattctaatcctgagaagttaatctttgtctggctcgtattaatactggcatttttccccggtatggatttgcttctttggtatggcttatcttttaaggagttatttggaattaaggagcagcaataggtggcagcccttttaccttttaaaatataatatcaggtggtcggttttgttctaaatgtaatttatgtataaaaagataacgtcaagggaaacgtattttctttgtgtgttagtgtttaactttctggctagattcaccttttgccatttaaaataattgtgaagtaaattgttaagtgtattaaattacacaagtataatagcttacatactatataaaacaaaatacagttttatatcgttgtaaaataatttttctaattttttataggctatggatgaaatgaatggcaaagaaatagaaggggaagaaattgaaatagtcttagccaagccaccagacaagaaaaggaaagagcgccaagctgctagacaggcctccagaagcactgcgtgagtctacattttagtagatatatctttggacaaggaataacgtgataatggagatcagattaataaaacaaaatcagagtcttgaagcaaactgatttgttttttcttttctcccttctctactttgctaggtatgaagattattactaccaccctcctcctcgcatgccacctccaattagaggtcggggtcgtggtggggggagaggtggatatggctaccctccagattactacggctatgaagattactatgatgattactatggttatgattatcacgactatcgtggaggctatgaagatccctactacggctatgatgatggctatgcagtaagaggaagaggaggaggaaggggagggcgaggtgctccaccaccaccaagggggaggggagcaccacctccaagaggtagagctggctattcacagaggggggcacctttgggaccaccaagaggctctaggggtggcagagggggtcctgctcaacagcagagaggccgtggttcccgtggatctcggggcaatcgtgggggcaatgtaggaggcaagagaaaggcagatgggtacaaccagcctgattccaagcgtcgtcagaccaacaaccaacagaactggggttcccaacccatcgctcagcagccgcttcagcaaggtggtgactattctggtaactatggttacaataatgacaaccaggaattttatcaggatacttatgggcaacagtggaagtagacaagtaagggcttgaaaatgatactggcaagatacgattggctctagatctacattcttcaaaaaaaaaaattggcttaactgtttcatctttaagtagcattttgctgccatttgtattgggctgaagaaatcactattgtgtatatactcaagtctttatatttttcctcttttcataaatgctcttggacattattgggctggcagagttcccttattctggggattacaatgcttttatcgtttcaggcttcatttaagcttcaaaacaagctgggcacactgttaaatcatgattttgcagaacctttggttttggacagtttcatttttttggatttgggatagattacataggagtatggagtatgctgtaaataaaaatacaagctagtgctttgtcttagtagttttaagaaattaaagcaaacaaatttaagttttcttgtattgaaaataacctatgattgtatgttttgcattcctagaagtaggttaactgtgtttttaaattgttataacttcacacctttttgaaatctgccctacaaaatttgtttggcttaaacgtcaaaagccgtgacaatttgttctttgatgtgattgtatttccaatttcttgttcatgtaagatttcaataaaactaaaaaatctattcaaaacattacctatttcaaattcaattgtgtcctaaaacattattttattcgtaatccttgcaaggaatattgttttcaaagtataactgcctatgtgagtgatcaaattcatgcaaaatttcttgtttattccaacatgtgttgtggatattagactgaggattagtctaaattcaagtatttattccaattagcactttcattgattggtgttctctcatagtctcttctaattttgaaattttatcttttattaaaaaaaaaaaaa

SEQ ID NO: 297 - DNA, 482 bp, Homo sapiens
tcacgccattctcctgcctcagcctcccaagtagctgggagtacaggcgcctgccaccatgcccggagaattttttgtatttttagtggagacggggtttcaccatgttagccaggatagtctcgatctcctgacctcgtgatccacccacctcggcctcccaaagtgctgggattacaggcgtgagctgccgcgcccggccgaggttgctttttaagtagtaaagattttagagttgaggagataacttgaggagagctatgtcaatcttttattcaattattttatttttattcatttttatttttaatttataaattaattttttaattttaaataatagaaatggggttttgccatgttgcctaggctagttttgaactcctagactcaagtgatccgccttccttggcctctcaaagtgctaggattacaggcgtgagctgctgcgtccagcctcctttattctgtttttatgagaa

SEQ ID NO: 298 - DNA, 188 bp, Homo sapiens
tcacgccattctcctgcctcagcctcccaagtagctgggagtacaggcgcctgccaccatgcccggagaattttttgtatttttagtggagacggggtttcaccatgttagccaggatagtctcgatctcctgaccttgtgatccacccacctcggcctcccaaagtgctgggattacaggcgtgagc

SEQ ID NO: 299 - DNA, 1169 bp, Homo sapiens
gattgttatattctcttgctcagttgacctctttattattatatagtgaccttatttttctcttcttacagtttttgtcttgaaatctattttgactgatacaagtgtagctactccagctcttttttgcttttgtcgccatggaatatctttttttcatctgcttattttcagcctatgtgtgtctttataagtgaaatgtgtttcttgtagacaacagataattgggtcttgtttttttatccattcagagccactctgtgtcttttgatttgagagtttagtgcgtttccattgttattaagaagtaaggatatgttctgccattgtattgtttgtcttttgcttgttttgtggtcttctcttcctttcttcattccttcatttcttttattgaaggtgattttgtcttgtggtatgatttaatttcttcctttttattttttaggtatatgttatatggtttttgatttgaggttatgatgagtcttgcaaatattatcttacaacctattattttaagctgataaccacttaacattgcataggcaaaaacacacagaggcaaaaagaaaaccaataaaagctctacactttagcctcttgctttttaactttttgttgtctctgtttatatctcattataatttctatgtcttgaaaagttgtcattattagttttggttggttcatcttttagtctttctccttaagatcagagtattttatatatcacatttacagtgttataatatgctgcatttttttgtgtacttactattaccagtgagttttggaccttcagttgatttcttattactcatcaacttccttttctttctgattgaaaaactcccaggctggacacggtggcccatgcctgtaatcccagcactctgggaggctgaggtgggctgatcccttgaggtcaggagttcgagaccatcctggaaaatgtggcaaagctccatctgtactaaaaatataaaaaattagttgggtgttgtggcgagcacctgtaatcccagctacctgtgaggctgaggcaggagatcgcttgaacccgggagacgaaggttgcagtgagccgagatcgcaccgctgtactccagcctgggtgacagagcgagacgccatctcaagaaaaaaaaaaaaaagaaacagaaaaa

SEQ ID NO: 300 - DNA, 1169 bp, Homo sapiens
gattgttatattctcttgctcagttgacctctttattattatatagtgaccttatttttctcttcttacagtttttgtcttgaaatctattttgactgatacaagtgtagctactccagctcttttttgcttttgtcgccatggaatatctttttttcatctgcttattttcagcctatgtgtgtctttataagtgaaatgtgtttcttgtagacaacagataattgggtcttgtttttttatccattcagagccactctgtgtcttttgatttgagagtttagtgcgtttccattgttattaagaagtaaggatatgttctgccattgtattgtttgtcttttgcttgttttgtggtcttctcttcctttcttcattccttcatttcttttattgaaggtgattttgtcttgtggtatgatttaatttcttcctttttattttttaggtatatgttatatggtttttgatttgaggttatgatgagtcttgcaaatattatcttacaacctattattttaagctgacaaccacttaacattgcataggcaaaaacacacagaggcaaaaagaaaaccaataaaagctctacactttagcctcttgctttttaactttttgttgtctctgtttatatctcattataatttctatgtcttgaaaagttgtcattattagttttggttggttcatcttttagtctttctccttaagatcagagtattttatatatcacatttacagtgttataatatgctgcatttttttgtgtacttactattaccagtgagttttggaccttcagttgatttcttattactcatcaacttccttttctttctgattgaaaaactcccaggctggacacggtggcccatgcctgtaatcccagcactctgggaggctgaggtgggctgatcccttgaggtcaggagttcgagaccatcctggaaaatgtggcaaagctccatctgtactaaaaatataaaaaattagttgggtgttgtggcgagcacctgtaatcccagctacctgtgaggctgaggcaggagatcgcttgaacccgggagacgaaggttgcagtgagccgagatcgcaccgctgtactccagcctgggtgacagagcgagacgccatctcaagaaaaaaaaaaaaaagaaacagaaaaa

SEQ ID NO: 301 - DNA, 702 bp, Homo sapiens
tttttttttgaatttttaaaattattattatactttaagttttagggtacatgtgcacaatgtgaggtttgttacatatgtatacatgtgccatgttggtgtgctgcacccattaacctgtcatttagcattaggtatatcacctaatgctatccctcccccgtccccccaccccacaacagtccctggagtgtgatgttccccttcctgtgtccatgtgttctcattgttcaattcccacctgtgagtgagaacatgtggtgtttggttttctgttcttgcaatactttgctgagaatgatggtttccagcttcatccatgtccctgcaaagggcatgaactcatcattttttatggctgcatagtattccatggtgtatatgtgccacattttcttaatccagtctaccattgttggacatttgggttgattccaagtctttgctattgtgaatagtgctgcaataaacatacgtgtgcatgtgtctttatagcagcatgatttataatcctttgggtatatatccagtaatgggatggctgggtcaaatggtatttgtagttctagatccctgaggaatcgccacaccaacttccacagtggttgaactagtttacagtcccaccaacagtgtaaaagtgttcctatttctccacatcctctccagcacctgttgtttcgtgacttttaatgttttctt

SEQ ID NO: 302 - DNA, 702 bp, Homo sapiens; identical to SEQ ID NO: 301

SEQ ID NO: 303 - DNA, 3200 bp, Homo sapiens
gttgtttttcagcatattctgtctttctcctcagtcaaggaccaacctaccttttcttttctagtgctgaggaatgtaaacaagtttgctgggccttgcgagacttcaccaggttgtttcgatagctcacactcctgcactgtgcctgtcacccaggtgaggatacatagttcccagcttttgtccggactgtcggactgttggggatgcctgggaatggggataggttttaatgcctatcatgggaccagtcttatagctagagtcagggaaggactcagcagtttaactgtggtgaacagctggaatatacagggcccggattttcttgggcctgggcagccagtaattgtcagtgtctttggggtaccattttcacctccataagaaagtaactgttacacagtgcattgaaacattttcttcccccttccccttacagacacttctaagatggtaagtgtacatggcaacaaacaaataagtatttttaacctggccactttggcgaaaacaacctcaagttgactgttatatgtggtgccagtctcctaaaactgaccctccagatgtaatgagcaaagagcttattcttatcacttttatgacctgaatgctgaagtgccaggttttgaccagggcaggaggtatgaattgaatatcccttatccgaaatgcttgggatttcggaggaaaaaacactttcagaagtgtttttcaattttggattttttgggattttggaatatttgcagaatgcacaccagttgagcattcctaatccaaaaatccaaaatccaaaatgctccaatgctcattcgcttgagggtcatatcagcgttcaaaaagtttcagctgttagggatgcttggcccttacaggagaggaggagcatctttggctcccgatgagcacttttctccacgtgctttccgtctcctggttctgaagcaaagcaagaagcttagctgaaaggagtgggtagtagaatttgggtgccagtttcttgatggagagaagaaaggtagctctcctctaagcccaccctttgatgtctcaaggtgagtttcttctcccaggaggcaattcttgatgaatctgtagcactcactggtagtttctgtgttaaatgcattcataggtaaaagtgatgttcagcagtgccttgccacacccaaaatcatttctcaactttgattgttttaatgagtaataatatcatttgggatgtcctggttttgcatggtgtctgggttagctgacattgatacacctcataaggttgctcatggacagctgtaggtgttcatggttaacttttattgtgcccttactgtgtgtcagggcactgttttaagtgttttagatgtattaactaagataatcctcatctgcttttctggatttgttactatttttcccattttacaaatgaggaaattgaggttcaacaatgtttaacaatttgcctgacagttattcgtggagccagaattcacatgtagatattctggtaccagagtcctcactttgaaccactccgcttaatacagtatcctttcgatagcatctaaattggtgttttgttttgttttgttttcaactgttattagtaggcaaagccttctttcaaaataaaatcgacatgaagcctgtgggatttagcagactgaggcaaagcttccctggttgctttggaatgggaggcctggacctgctggctctttgccctcctgacacatcatcccttgtttccacagcacactcagcattggaagcacactgcagacggtgtctcattaaagcagtagctcccttgaacccacaagttaaaacgccagacttttatttatttgtttattttttctgagttcttattggcagacttcagaatgaggtacctgaggaaatatagaaacctctgccttaaggttgattttactaaatgctctattttctggtgcagttattgactgtcttatctcttttgtcaggaatgtcttttttaattagaagacaggaagaaaacaaaaaccagactgtgtcccacaatcagaaacctccgttgtggcagaggggccttcaccgccaccagggtgtcccgccagacagggagagactccagccttctgaggccatcctgaggagttcctgtttgggggtgtgagggaaaatcagcgcggattttaaaaagatggctgtggcctgcccggcgtggtgggaggggagctggtttcctggtgaactttctaaaaggaaaaataattttaagtaaagaaaaaagaaaaaaaaggaagactaaacagaaaccagaactgaaacattcacctggtagcaaatgacacatgcacgcacacacacatacacgcacaagcgccagtgcgcacgtgtacacagaaaaacaaaaggacaagctttctgtgaaacaaaatatttacttagggataatgtggggattcacatgaattaaatagctgcaattggaagaagagggtcagggtcatttgttcaggttttctattgttttgtcctctctttcctctcctacccttccttctctttctctctcccctccttttaaatgcaaatgagtagaaatttcttctaccttccccagctgtttcttcccacctttagagttgtttagacaaggaggagtaagcaaggaacttgttctgctttctatcgtggtcacattggtgatgctcgggacctgccagggtcagaatttatggatatctgaaccctgaccccgttcattctctcagtccacttccaatccacatcagtttgttgtctgccttggagagaagagccaaaactggggtgggcgggtgggtggggagtgcaggatataaatgtgtaagtttttgttttttaaggtttttttcttagtgaattattcacccacagacatgagagaaaaaaagagggagggtgtgtggagaaaaaatgtttacagggctaacaagggatgatgtgtcatttagtatgttactaaaaagtgtggaaatgacttgattttaaggggagggtgaggccgaagagggaagcccaaagcagatcttaatgtttcaaaggagtgcagcccttcacagccatcagatatgagggcactgttctgtctggtgttgtagccatctcaagaacaaatcaacagcaacaaaagagaaagaataaatttttaaaatttaaccagt

SEQ ID NO: 304 - DNA, 3200 bp, Homo sapiens; identical to SEQ ID NO: 303

SEQ ID NO: 305 - DNA, 337 bp, Homo sapiens
tttatttccaaaagtttccttgaacccctaggtaatacctgtttcctccctcttcccatccatccccatttccacataaccactggtttgttttctatcactgtagattagtttgcattttcctgagtttttaataaatggaatcataacagtctgttatggcaattgggctttgagctaatacctgcagagctgtattctaatgtgatagatctggcagtgttgttgatatactgacacttctctgccttttctttgcctgtcactttaactttttcactcctgggcataaatcctcaagctacagaacaataggaattggtgaaacaaatcttcc

SEQ ID NO: 306 - DNA, 337 bp, Homo sapiens; identical to SEQ ID NO: 305

SEQ ID NO: 307 - DNA, 3055 bp, Homo sapiens
ggagtcacctttcctcactaggagctgtttgcttcagcaaagcaggatttgaggagttggggtctgattggggaaaagcttgctgaggtggaggtggcgataagcctggacttgccctcacctcaccccacaggccaggattcgtctttgggtttcagggtgcatgtctgtcttagcactgactgcgtgccaagccctggatgttgatcaggcagacacgggctcagcccttgaggctcacagtgcggtgggttgcacaggcagcggcagctgatccctcttaccgggtctccttctcgggactcccttcagtccacttaccccgtttctgccccccaggccttctctgggcagtgactgtgagggctgacaggaaaggcatgtgcagcgtgcttgtgaggagctcagcacagagggtggggtgagggcatgtgttgctgaagtctgcatcctgaggtgcctgtggcaaaccactcttcccttctgtctcctcagttcagccaggccctggccatccggagctataccaagttcgtgatgggggtaagttgtgccagctgtccttccttcccactgccttgcggacccaagcggggcctaggaggccaaccctggtaatggctggaggcaggtcttggtacagggtgttggcgtggtgtgtccctgctccctgggccggggtgggtcactggcactcaggcctctctgggtttcagattgcagtgagcatgctgacctaccccttcctgctagttggcgacctcatggctgtgaacaactgcgggtaggtgtgcgcccctctacttgccactctacctaccaaggctgtggggtgggggagacccaccgagcccttccagcactctgccccctcccacctgctctgtgtgtaggcttggcctgccaggcaccctggcttccgctgggatttcccagcaccccctggggtaaactgtggtgtcaggggtcagggtgtggatgggtggtagcctgaaggcattccttcttgaagtggctttcccgtggctggctgtcttccactgttctctgcatctacactctccttctccggcaggctgcaagctgggctccccccttactccccagtgttcaaatcctggattcactgctggaagtacctgagtgtgcaggtgagcaagcactggacggcggaggcctttcctgttctttgctacatccttcagctgaaatggttttgtggatgcttcattgcatgcaaagataagtggtttcatggaattcaatattgtgaggagatacttggtatctataaggcatttaagttttcatcttacataatttcagaaaggatttgaggtggctaagtgtgggtttattttaagattatacatcagacaagaccttttcttctttgagtcttaaagactcttaggataaggataagagaactctggcccaggtggcaggtggtaaagcccaagaactgcttctccttcaagtaacatgggctgaaaattcgaggtctgtaaccagttgagctgagttcctgggttgttagggcggctggcattggaaaccgactcctccctcctgcaggacattcctgggcccaggagagcctgtgggtggggctgggccacgtggggaactggcagcagtaccaaccttgggttctcgtgttctgtaccgaagctacctctccgtagctggagctcttgggcccagcagtcaggggtccaggctttggccgagggcagaaccttgccttttcctggccttgatttgcctcgcagtgaaatggggcagtggcccggagggagccagaactctgagtggcctcgaggctgagaagaggacagatgggagggaagcagggaggagagccgcagttcttcccagtggccctggtcagcgtgagtgtgtctcgtcctccctatgagcactgaaagagtcctagaccacttgggctctgaagcaagaggggcaatgagcctcctctctagggctctcctacagagtagccccaaagacacccctgggcaggaaatgaaccgctcccttctgcttcaacacaggcagattctgccctccagggatgtaggccgaggccgtccaccccggagctgggtctttgagctcctggacccttctttgcctgacactggccttcctctcggagggacaaggaagcgtggcctccctttcactcaccttacttttccttctggtccagggccagctcttccgaggctccagcctgcttttccgccgggtgtcatcaggatcatgctttgccctggagtaacctgaatcatctaaaaaacacggtctcaacctggccaccgtgggtgaggcctgaccaccttgggacacctgcaagacgactccaacccaacaacaaccagatgtgctccagcccagccgggcttcagttccatatttgccatgtgtctgtccagatgtggggttgagcgggggtggggctgcacccagtggattgggtcacccggcagacctagggaaggtgaggcgaggtggggagttggcagaatccccatacctcgcagatttgctgagtctgtcttgtgcagagggccagagaatggcttatgggggcccaggttggatggggaaaggctaatggggtcagaccccaccccgtctacccctccagtcagcccagcgcccatcctgcagctcagctgggagcatcattctcctgctttgtacatagggtgtggtcccctggcacgtggccaccatcatgtctaggcctatgctaggaggcaaatggccaggctctgcctgtgtttttctcaacactacttttctgatatgagggcagcacctgcctctgaatgggaaatcatgcaactactcagaatgtgtcctcctcatctaatgctcatctgtttaatggtgatgcctcgcgtacaggatctggttacctgtgcagttgtgaatacccagaggttgggcagatcagtgtctctagtcctacccagttttaaagttcatggtaagatttgacctcatctcccgcaaataaatgtattggtgatttggagttttt

SEQ ID NO: 308 - DNA, 18038 bp, Homo sapiens
gggagcttcggacccggaagtggcgccctgggctcgcggcggtgccgcggggatggcgggagccggagctggagccggagctcgcggcggagcggcggcgggggtcgaggctcgagctcgcgatccaccgcccgcgcaccgcgcacatcctcgccaccctcggcctgcggctcagccctcggcccgcaggatggatggcgggtcagggggcctggggtctggggacaacgccccgaccactgaggctcttttcgtggcactgggcgcgggcgtgacggcgctcagccatcccctgctctacgtgaagctgctcatccaggtgggggaccagaggcgccgtagggagatgggaggctgatgtgaaggtgacaggccaggatttggaggattggggcgggcagtcaatggcgacggatttggggagaggggtggggacggcgggtttggggggccgagtgggtgggatgggagggaagccgtgagggagttgggaacgcaggggtcacgggttttaggatacagaaaggagaccaaggggttagagtaataacagatacgggagagggtggaaggaacaagcgatttgggggagtgccaaggagggagcgatgggctggaaaaacatatttgggagataaaggagtggggacgatggacttgggatagggaagggagcgaatttggggcgagggaagaagcaatagaattgggggaggggcaagaagtttgggtgaagagatggggaggaaggttgggggcccaggcaaagtgtttagagaatgaggagcacataattggggtagaggggaacggaggctctggatttgatagagatggatttaaaacgtcttggggtggggacaaagtgggcgccagggccagaaatttaggagggaaagaaggacaccagactgggggtggacagaggagacggaggtcttgggttgcattgtgatttaatttggtgggagagtgcgaaggcaaagacttttgcaggggaatgctatcggtttaccggagatgggggctctggatttgatggcgacgacggatttggtaggaggaggggacagggtgacgcgtatggggggaggggaacagatagggccagcattgggggaggggagtggcagcgatttgtctagagaggggagctaggaggaggctttaagcggggaagggggatgacgcatttggaggaggaaatggaagtcatagttggggtcagagagaggaatcacagtgcttgtatctgggcagatgaggagaaggggcacgggagtattgaaattgggcagaagggacagtggagacataggtggcaggataggtagggactaccagaaattgagaccgaggtagggatgtctctggaacagagggatgcataggcacttggcagatttggtggtggccagcaatgcggtacagatgaagtgtgctgcttgaggagtgagctggaatgaagggcgtgtggaggtgtgagaattaggtgggtgtggctgggatgggtacagttttgatgggggtcattaggccagaattttccagttaagaagcttggggggaggaaggtaaaaattgaattggagacccatccaagatttgagttgaggcaggtgggtgtcagattttaccatctttataattgaaccgagagaatgcaaaatacaactggaatgagaaggccttgagaatgagagtaattgaaatctgggatccgaggaatggtaatagatttgtgggtgtgaccaggaatatgacaaggaatgaggagattcagtcaggggcatcaaggtgcctgactagaccctaattgtgacagatttgaaaattgttgatggcggaaggtgtagaccagactggcatttggttgtgatttgggaatgagggctgtcttacagggttaagattgtatttacagcagttgaacttgaagtttgggagataaattggtgctttggacctgagaagtgagggttctggaaactgatggaatgagactgagtgagggctaggattttagggcacaggtgggagagtctgtggagtgaaggatactggagcacaagggctcagtgtgagggaaatgaagaagtggcttcatcatttggatgatggcagatctggtttgaaagaacattgaaatgagggtggtttgggaagggaatgggggaatgaaggacaccaaagcgtgagaagaactagatggtgggcaggtaaggatggatgagccctgttgaaggaccagaggtgcctgtctgatttgaacccagctggtgttgagtgtaacatatattagggtaagatcttcaatgggtatagtttgggaatcagagtaataacttgcagaaaggcaaattactgggagtgggggtgtcaggagtggagtgacagatttggggattgtctagattaggtgcgtaagaatgcagtgccttagattagtgcatgtggctgtcaggtttgggagtcggagattttaagatgacagactgtccctgctggtatctgatatagggccacagcatttgccgtagttaggactgggttaacagatttgaggttgaaattgggtttaatgacttgggaacaaataattaaaacttgaaggcaggaggaatgggggtgagatacagccagtgtgcctatgataacccaatagaagttaagaaaatagattcaacagatttgggagccatggggatatgggataacgttacaaatttaagtatgaaattggggtcagtgggactcccaaatagtgttgactaaactggataaggacagcaaaagagcagttgtggcgatttggagtggaggaataaaggaataccacctgtatttaagagaacacagatcaagacaaaacttaattcagaacaaccttggagcttttaacccagaagggaaaaggtctagaagggaagtactcactgcctgggtcagctgactcacccctttcctcctttgctccactgggtcaaaatttttttcttttaaagacagtccccatcatagaggagtttttaaatttacaatcattaatctgttaggcatctcagaatcagatccataggagatagcctgaactttgaaaagcacttgcttgataaaggcaaaaggggacagggttgatcccaaaaagcactggaagcatacctaatccagtttacaaggtagcgctttctaacttgccacttctactgcctcccacagctgcaggccaaatcctctcccacatgtcagaggaatcgctctggtccatgggcccagctggcctgcttagagggcacagggctggtatcctggccccttgccaagggaggaaggagccttctcactccccacctaggtgctggtctccttgacaccttgcctcctccctggcagcaggggctctcacccctcgacagagacttcctgctcctcacatggatatggatggtccttcacccacccgcgggtttaataaatatttcaggctgggcgcagtggctcatgcctgtaatcccagcactttgggaggccgaggcgggtggatcacctgaggtcgggagttcgagaccagcctgaccaacatggagaaaccccgtctctactaaaaatacaaaaaatttgccgggtatggtggcgggtgcttgtattcccagctacttgggaggctggggtaggagaatcacttgaacccgggaggtggaggaggtggaggttgcggtgagctgagagcacgccattgcactccatcctgggcaacaagagtgaaactccatctcaaaaaaaaaaataaataaataaatatttcagatataagaagcatctgtacagcaagaactatcatagccctacagaaatgagggggtcgttttgtcacagggatgtagggtgattgaggtgagaacgcagctaaggatatgtttgaggagtagctggaatttgaggtaacagtttgctaagcctgggaatgggaggaatagacatggaggtgtctgcagtagatttggtaagaaatttgagtttggggtgcactttggaatagatgacttaatggctgacctgtctgaggtttgggtatgatgtattttcttattgccacatttggaattgaggttggaatgaagtttttcatctggagatgagaataactgagatttgttctgagatgggagtagggtttgcagtacatacaaatggaggtttctctactgggaatatttgggatttgaatgtaagaatgttggggtgtgggtgtgacttggattgtggttggacagtgtctgggaccaggcatttctgttgattgggagtttacgtgctgccaatggttagagacactgacgagctttctggtatgctttgatggggaaaacatgaacaagagccacattagaatttgtgggagaagagttaagcaaagggggcaagaggtgtgaggagaggtggtgaggctgaatcaccacgagactctgagcgtccctttgtctttgttaattctgaaggtgggtcatgagccgatgccccccacccttgggaccaatgtgctggggaggaaggtcctctatctgccgagcttcttcacctacggtgagtgtgcctcccaagcaggaaagcccacaccaacagaaaagaggcctcaggtggggagcaggaccagctggccccggggaactcactgcgcagcatggcacgcagtcgagctggcatggaggaggggatctaagcgtgtacagagaggacatggtgtcggggtgcgagcaggtgaaccatacagctttggtccagctcctctgcctgtagctgccagctgccagcccagacagcaggaggggacagacacaggtgcctgagagaggagccaatctaggacactggtccctattatttctgctgccccgggttgtgcctggaacatgcgtgggggtgatttccttttgtcctgtgagcagcctggccctgctactccagcaggaggcccggggggtcctcttgagtttttttcttttatcccacctgggtgtcttgtttcccctgcattcctcaggcagtgagtggtgctcactcactctggtgtctccatctgttggttacagaatggtgtgcagtgaattgcagcttcacttctgtgtgctgcgtgagtttgggtgggccacttacctgctgtggcctggctgcaccccttgtctgcaaagtaaggtcagcttctcctgcccaggccttcctgcaagctccccaactgtcatcaagaagcccaccttgctgcctctgctgcccatcacctggcccacaggtgccgtctggccagggccttttcatgttcaccctcactgtccctctcccagtccctaccctcaccagatgaccatgatgaaggccttctttaaatgtgccctttttctccgtgttcacagctggagttccattgcaggcaaatcccctccagtttcctgcacctctgctcttacctgtttggttgtctagaatattctccagaatctatctttctgttgagtaacttggggcttggcctctgtcttaccttttccatttcacatgctgttggcagaattgggtgtcatatttctcttccagttttgtccctgtgttgttgagtgcagagtctagggccaggtggaatgtgtcatcttgtgaggaaatgtgtttgtgttgttttttacttaaaaattgtcagcgtagtggagaggggaatgacagaagtaggaaggcaccccaccattgtgtagtgaggcagtatacagagaggtaaggcagccggggcagatggctgcggccctgcacggggctttttctggatctggttgcacgtgctgtgttctgagaggcgaggttagagcccagatcatctctattcatgtgacacagccattcccaaaaggacttagagcagagggaacttgacccccatcttaactgtctcttttgaggatgagcagagttctcaggtgtgcccccagcctggtttatataaatgtagctttaatctaggtgtgagcagatgtctgttggggatctctggacaccaggcctactctggagtcagagaggggacccgccatttggctctctggtacagtgtggacagtgtctgctcctctacttgtcatggctgaaagtactgcagctgtcatgacattctctggtgtagaagaaagaacttcccagagggtttcctggcactgcagaaagacccagaatgagggaggccctgggacccacagaggcccctgcaggcatttcagcacgcctccctccgctctcacttgttcctcagttctctcagaaatggagagaaatgacggtccttattccttctttttttacaggtgggcagatggaagagggtcgatgttttgctcaggatcacaaacagaggtcctgaggctccctctcctcactaggatccaccctcccccaaagcaaattttccttttgcctgttcactctgtgaagagggctccttgccaagtcacccagcatcccctcccctcctcctcctctccttccagcccaccctcatctcaggcaatcacatatacaggtaacaggtgttctcagcctcatgaaaaacccatgctagctgtgacattgaattgctgggctggcagacatctgcggaggagcaaaaggcatatttgcttcttcctgcctctgcgcggtgccagagagctaaagtcatggtctaacagggggagcatgctgtctgagagaatgttctgctagcttccagatgcacaggtttataaaaataccaccctgccatttaaaacatgtttaaaatgttgatagaaaacaatgaatcgtatccttagaaagacagaccctagtgaaagaaacactaactcacacaggtagggtctagcttccataacatttaagtttattctatggaattgttcattggtgctcctgttttagttacttctccatagacttgtttttcccttgactaatcaatgccatctggtgccaggtggtatcctgggtgtagcacagtgacagggtggagactgccctggccgtggcatgtgcagggggcgttcttgagcctgtcttctgggagccctttcttttcctttttccctcctttaggttgaagacttcatcattccctgcgggcagtttctctgtttttcctattttcttttcctcaagaaaaatgtaatttttaagtaacagaattgttttctgtgttgcagcatttaagttgctgagttgagaaatcatggctgagtttgccaagtaaagtttttaaagcaaaaaaaaaaaaaaaaaaaaaaaggagggagggagggaaggaaggaagaaaatatatgaacttgtttgtcagaaatacattttgaggcttttactaaaagaaatgggctagaagacatttgggggttagggcctgactgcttccaggtcctggacagatgttaccttctgtgcctgtagtcagcagttacctgaaggacaagccgagcctggtctgggtgtgtgtgacccaggagtgggtgcccctgaactgggtgtgactcctctgccacctctgttttcttacagccaagtacatcgtgcaagtggatggtaagatagggctgttccgaggcctgagtccccggctgatgtccaacgccctctctactgtgactcggggtagcatgaagaaggtgagcccacacaaagccaggaacagtcgcccgaggtttcctcatactcccagccacccctgcagcagccagttaccctggtcttgcctcctccttcccagaccattgggggcttcactccagccccatgggggagctcccaccccacagttctgctttcccacagctgtgacaccagatagtggctttcttttccccccaagctccagacctggaggttacctgaggtgggcccagccaatagacactgcagaggaaatatttggagctggttcctgccgcccaagtccccgaagagttccatggaagaggcgtagctgaacttggttctttcccttctctgtttcaggttttccctccagatgagattgagcaggtttccaacaaggatgatatgaagacttccctgaagaaagttgtgaaggaggtgggtgttgagagttggagagggagaggtgcgtggaggggagcctgatgatttctcacccccaagttgggcgggtcattgacaagtcgaagagttgggtccttgtgtatgcatgggtgggatggtaagggaagaagccctggcctggatgtgccgggaaccccggaaagccttctcagccattgttgggcctagcctgggacccgacagcactcctgggtgggggactggggagtgggcaacaggtggagccatccttggcagaccgaccccatgtgcagtccctgggacaggtttctccctcctgagcacttgtagctcccctcgagggccagttccagagacaggccgagggtggcgagtccccaccccatgctctcttccagacctcctacgagatgatgatgcagtgtgtgtcccgcatgttggcccaccccctgcatggtaagccaccccccttcccccgagactgtatctaagctggcgtcgggggcgtggggtgaggggcgccccctcgtggactgtacatagacagccgtagacctgttgggaagtggtagtggggttgggggtattctactggaacccacctcactgaggagagattggaattctttccaaagggaggtggggctcttcccaggcagtagaaatggcatgctgtggtcatggggtgtaacagggaatccgaaaggccctcttcctctcctgctctctgaataggccacgttgttcagtggccactctgcacctggcacccggtggctggagcattatgaagtgtggcccaccacatcacctgtgtgtgttttcttttttttcctcagtcatctcaatgcgctgcatggtccagtttgtgggacgggaggccaagtacaggtgggtaactcttgggactggcagagtggccctgttaccctttcagagtcggccagggcaggccgtgctgggattggttgctgcaccttttctgccctagtgctgtgtgagttcagcctgctgcctggcttctgaggaatgtggcagtggcttcaatagtctgtccagggtcattttctcttcgtcatctcttatcaagggcagccctagatgagcctagatgcctttgcagaggggtgagtgggattgtagtcagcttggattaggatttctggccccagagctgattctgccacttaggactgagctggggtctccttttggactcccgaagtaatgctctaacgatttttccggccctcataggctgatagctctttttatcccctatgaagaagccatccaccccatgggcttggggctcatcccttccattgtgtaccagaccctcacctagatctgctgcgtgcagccctgggcaggtgccaggggcatatgtgttgacacggaggtgggtcttggaggcatgtgtgaaggacacacctgggttgcccttcctctcttaagattctcatttcctggggtcggtgttttttgcagctgtcctgcggggccaccatcccaggaagctcagctgccatggtgcctcattttggggtcattaatgggaaattggcccattcccctagactgattatgaggttggtagttgggaccagaagggtataatctggccaccactgttctgagtggtggggccgggcctggcagggctgggatgatctgggaccggggctacccagggctttgccttccactggctccctctgttagtaggttgttattgagcttccttggcatttcacacccaagaacccacagcctgtcctctcatccagcttgtcctctcatctctaacagggtgcagtggccagggcatgagtccccggctccctgctgaggagtgccagatgtcttctcctaggctggttccagtgcctcctcctgcagggccctgtattctttctctgccctctgggaaagtacttctctttgcttactaccccctcctactcttactcttgggcgggcctgtgggctcctctgctagagggttgtttaaccagagataagtgtgagggccgggtaagagaagggcctgccgcctctgcagcagtggcccaagttaggagatgcattcctaaactcctatctcccagaaaacaccagtagaggactgctagtgggctgctcccatgggtggttgggcttccccagtctccatgaactgtgtaaactcctcctcaccctgaacaagcgctctttgcctttctacttggttcttcatggtaatagtcctccccatccctgccaggactggctggatttgagcagaactggtgggctcagccccacaccaacgggtgggcttctggtaggtgactgcatgaccctgtatctctgtcttgccttcttcacagtggtgtgctgagctccattgggaagattttcaaagaggaagggctgctgggattcttcgtgtacgtgagtttatacaccccataactggccacgggcatggctctgctaacaggtgtgtcctcaacctctcagaccgcagctgctggcctgggacttcactacatggccctgccctagcctgagtgctgcagccagctctccagagctccatagcgtgtccaagctgcttagcccttttcaggccatggctcatgtaaaagtggaactgtgtgtctagtacatgggggagatgaactgaccagccccactgggcctcatccagttgtggtgggtgtggggctggtcttcatgagctaagtcactgcatagtccttggcctcactgctaaaacatgactgaaaatctgacttggactgagggtggagctctggaagctcacaggctgaccacagccagtggattctgtttgacattgcttttctgacaaattagttgttgccgttaacatttaagatatgttgcacaaaaatccacatgtctggcatctcttgaaaagccagaaaatcttgtcctgctgagcggttctttctgtagagcatccatcggccaggacccaggacctgcttctttggcagggcacatggtctccgagggccgcagacaccctgtacttcgtcacgtcacatccagtgtacttcacctctaaagaaagcacatactgaaaagactaagttcagaaagaataaggtgcagacagaagccaggcttgatgagttgtattttgatttgccgttttaaggtctaggcagtgacatacatgctgataagtatgtcacaaacgtggtagacacatggtatacaacagtatccgctgtactagatacagggctccatattattcataagaagtctttatatcatggttttcccggtttgtgagatgttttttatttatggccccttgtttaaccaattagtgactacttgtaggtgcatgtgtgtgtatatgatatagaaatatatatacggttctcagcaggaggtgattttgctccccggggaacatcggcagtgtccggagacatcttgtggttgtcacaactggcatctagtgggtagaggccagagacgctgctaaacatcctacagtacacaggacagccccgcaacaaagacttattcagtcaggtgtcgttgcttgcatctgtgatcccagttagttgggattagtctcagtggtttctgcagctgtcaggagaccaaggcgggaggattacttgaggccaggagttcaagaccagcctgagcaacatagtgagacttctgtctctacaaaaatgtttttaaaaattagttggccgtggcggcatgcacctgtagtcctagctacccgggaggctgaggtgggaggatggcttgagcccaggagttggagactgcagtgagctatgattgcaccactgcactccagcctgggtgatagagtgagaccctgtctcttggggaaaaaaaaaattattcagcccaaaatgtcaatagtgccaaggttgagaaactctgatttatattcacacacacacatatatgtatgtgtaagtatttatacatacatatatttgcacatgtacctggtaacaaaccaacatttgtgacatacctatcagcatgtatgtcaccgcctagaccttaaaacagcaagtcaaaaaacaactcatcaagcctggcttctgggttctgtctgtgctttattctttctgaacatagtcttttcagtatgtgctttctttagaggtgaagtaagttggatgtgaggtgacaaagtgcagggcatctgtggccctcagggaccatgtgccctgccaaaggggcagccccgggaccccagccaatggctgctctacagaaacagccacccatcttgaaacactgcacatgaccacctctggcatttttcacactgcgtagttctcttctggtgtttgaataggattcccgcacaacagatgcctactctttgggttctttctccccatgtgattttggaacaggtgatactcatacatgttacagtgcatagaaagcaccaaagggtatagcacaaagtcaatctgagcacaggcagggacgacaagattagaaattgcattcacagaggttccttttattaatactcttcatagatgtattacatatattcttttgagtttttcaaatataagatttttttttttaattcaaaaacaaaaattctgcttctcctcccaggagacagccatccttctcctggcgagcctcccagggcactctgtacctaaacaagcaaacacattgtaaaaaacacaagaggcacatgggactcactgacctcaaactggccttttgccctcagcactgcatcttggggaaccttccttagcagtttatagagctgtttatcctaaaggccatcacttaaaaagttagccctccttgtaaatgcttgcatagaatctttttgatagaatattttcaggggcaaagagaacagatgcattgagcagtgtgtcttctgagagttggttaggtaaagaggccaggagaaaattaccaacacgtcggcactcttattatctgcatttggaaattccaaatttggcagtattcacatcttgatccctggcttctgtggtttgaaaactgcttgagactgttagctaatttatggcatccaaagcggcatagaacacctccccatgggaaaaggagcactatcttcccagtgtgcatagctgctggaccctgcaggcctcctttctaaggctgtgccattggatatgctaagattttgagctcggaacatccctgcctgcttcctgggtgtggagcccccaggaactgctcctctccctctcctgctcatctctgcttaccttgttttttagtggattaatccctcacctcctgggcgatgtggttttcttgtggggctgtaacctgctggcccacttcatcaatgcctacctggtggatgacagcgtgagtgacaccccaggggggctgggaaacgaccagaatccaggttcccaggttggttggaacaaggacttgtccttctttccgtgtgctgctgatgcccagggtctgggacaaactcaaggattctgggattctcagcatcaggccgggagggtgagagaggacctctcattatccctggagtcatctttgtctaaggggagaacggcctcaagaggcgagattccagattagtacccagacctgggaggaattaatggaatgcttgtccctgggcgccttagaaacagaccccagcttatctaaggctgctccgaggcagtgacccaactagggctcaggaagtcagaagatagaccagctaatagtgatcacctcttgacctttgtgtcacgtcttttgctttttaaaacccttttgtgaacgttatggcctttgatctgacggcatcctagttgtgaagggaacagggcaggtataatgttcgtttaccaatacagaaatcgagacccagagatcacaaattctggagaggctctgggctctccagagtcactcagctggaactgacagggctggaattagatccctggccaggccaagggtgcattcctctgagttttttcagatctgctaggaagtgtacagtccgatacaccctcctattttgttagctgtggtctacacagcctagtatacatagacctttcagcaggtcgggtcaggcataggaaggcctggtccttctacacagcacttgttgaggaaggccatccaggtacctgaggggttgactggttctgcctgaaccaagataagaggtagggagcagcgatggctgggaattgcagtgtccagacattctcacagtggggatcaccttcaagaaggatggcattccttcttgaagtggctttccctcccaggaggctaggagggcctggggacgtgtctgccagaatcacctgggtgggaagggggtcatgttcagcatgtgtgtgtgtgtggtacatgtctgttctgtgtggtgaggagtgccccatcccagatgggagcctctgcttgcagggagactggccacttgacctgggcaggtgagtcttcactggcctttcgatgtaagcaaattaaagtggctccatagagacccaccccatctgcaatcacagtggtacattcctgcagttctgccccttctcggggggccttgtgggtgggtaagctgctgctgtcacatacagagcaagggtggccaggagtgcaccgctaagtggtttctcatctaggtgggcagctgtctgaccagaggctgccgtgcttacatcagcaacaacagcagtcaacagatttgtctaaagtgtttttcgagtgcttttctgtatgtggcttaaaggccgaggtgaggctgccgggctgtcaaagccactcaagcagacatctgagcaaatctctgaccaagaacccaggccatcgatctggtgggatggccgctccacaggaagctgagggtgggggagtcacctttcctcactaggagctgtttgcttcagcaaagcaggatttgaggagttggggtctgaagggggaaaagcttgctgaggtggaggtggcgataagcctggacttgccctcacctcaccccacaggccaggattcgtctttgggtttcagggtgcatgtctgtcttagcactgactgcgtgccaagccctggatgttgatcaggcagacacgggctcagcccttgaggctcacagtccggtgggttgcacaggcagcggcagctgatccctcttaccgggtctccttctcgggactcccttcagtccacttaccccgtttctgccccccaggccttctctgggcagtgactgtgagggctgacaggaaaggcatgtgcagcgtgcttgtgaggagctcagcacagagggtggggtgagggcatgtgttgctgaagtctgcatcctgaggtgcctgtggcaaaccactcttcccttctgtctcctcagttcagccaggccctggccatccggagctataccaagttcgtgatgggggtaagttgtgccagctgtccttccttcccactgccttgcggacccaagcggggcctaggaggccaaccctggtaatggctggaggcaggtcttggtacagggtgttggcgtggtgtgtccctgctccctgggccggggtgggtcactggcactcaggcctctctgggtttcagattgcagtgagcatgctgacctaccccttcctgctagttggcgacctcatggctgtgaacaactgcgggtaggtgtgcgcccctctacttgccactctacctaccaaggctgtggggtgggggagacccaccgagcccttccagcactctgccccctcccacctgctctgtgtgtaggcttggcctgccaggcaccctggcttccgctgggatttcccagcaccccctggggtaaactgtggtgtcaggggtcagggtgtggatgggtggtagcctgaaggcattccttcttgaagtggctttcccgtggctggctgtcttccactgttctctgcatctacactctccttctccggcaggctgcaagctgggctccccccttactccccagtgttcaaatcctggattcactgctggaagtacctgagtgtgcaggtgagcaagcactggacggcggaggcctttcctgttctttgctacatccttcagctgaaatggttttgtggatgcttcattgcatgcaaagataagtggtttcatggaattcaatattgtgaggagatacttggtatctataaggcatttaagttttcatcttacataatttcagaaaggatttgaggtggctaagtgtgggtttattttaagattatacatcagacaagaccttttcttctttgagtcttaaagactcttaggataaggataagagaactctggcccaggtggcaggtggtaaagcccaagaactgcttctccttcaagtaacatgggctgaaaattcgaggtctgtaaccagttgagctgagttcctgggttgttagggcggctggcattggaaaccgactcctccctcctgcaggacattcctgggcccaggagagcctgtgggtggggctgggccacgtggggaactggcagcagtaccaaccttgggttctcgtgttctgtaccgaagctacctctccgtagctggagctcttgggcccagcagtcaggggtccaggctttggccgagggcagaaccttgccttttcctggccttgatttgcctcgcagtgaaatggggcagtggcccggagggagccagaactctgagtggcctcgaggctgagaagaggacagatgggagggaagcagggaggagagccgcagttcttcccagtggccctggtcagcgtgagtgtgtctcgtcctccctatgagcactgaaagagtcctagaccacttgggctctgaagcaagaggggcaatgagcctcctctctagggctctcctacagagtagccccaaagacacccctgggcaggaaatgaaccgctcccttctgcttcaacacaggcagattctgccctccagggatgtaggccgaggccgtccaccccggagctgggtctttgagctcctggacccttctttgcctgacactggccttcctctcggagggacaaggaagcgtggcctccctttcactcaccttacttttccttctggtccagggccagctcttccgaggctccagcctgcttttccgccgggtgtcatcaggatcatgctttgccctggagtaacctgaatcatctaaaaaacacggtctcaacctggccaccgtgggtgaggcctgaccaccttgggacacctgcgagacgactccaacccaacaacaaccagatgtgctccagcccagccgggcttcagttccatatttgccatgtgtctgtccagatgtggggttgagcgggggtggggctgcacccagtggattgggtcacccggcagacctagggaaggtgaggcgaggtggggagttggcagaatccccatacctcgcagatttgctgagtctgtcttgtgcagagggccagagaatggcttatgggggcccaggttggatggggaaaggctaatggggtcagaccccaccccgtctacccctccagtcagcccagcgcccatcctgcagctcagctgggagcatcattctcctgctttgtacatagggtgtggtcccctggcacgtggccaccatcatgtctaggcctatgctaggaggcaaatggccaggctctgcctgtgtttttctcaacactacttttctgatatgagggcagcacctgcctctgaatgggaaatcatgcaactactcagaatgtgtcctcctcatctaatgctcatctgtttaatggtgatgcctcgcgtacaggatctggttacctgtgcagttgtgaatacccagaggttgggcagatcagtgtctctagtcctacccagttttaaagttcatggtaagatttgacctcatctcccgcaaataaatgtattggtgatttggagttttt

SEQ ID NO: 309 - DNA, 13540 bp, Homo sapiens
aggtgggtcatgagccgatgccccccacccttgggaccaatgtgctggggaggaaggtcctctatctgccgagcttcttcacctacggtgagtgtgcctcccaagcaggaaagcccacaccaacagaaaagaggcctcaggtggggagcaggaccagctggccccggggaactcactgcgcagcatggcacgcagtcgagctggcatggaggaggggatctaagcgtgtacagagaggacatggtgtcggggtgcgagcaggtgaaccatacagctttggtccagctcctctgcctgtagctgccagctgccagcccagacagcaggaggggacagacacaggtgcctgagagaggagccaatctaggacactggtccctattatttctgctgccccgggttgtgcctggaacatgcgtgggggtgatttccttttgtcctgtgagcagcctggccctgctactccagcaggaggcccggggggtcctcttgagtttttttcttttatcccacctgggtgtcttgtttcccctgcattcctcaggcagtgagtggtgctcactcactctggtgtctccatctgttggttacagaatggtgtgcagtgaattgcagcttcacttctgtgtgctgcgtgagtttgggtgggccacttacctgctgtggcctggctgcaccccttgtctgcaaagtaaggtcagcttctcctgcccaggccttcctgcaagctccccaactgtcatcaagaagcccaccttgctgcctctgctgcccatcacctggcccacaggtgccgtctggccagggccttttcatgttcaccctcactgtccctctcccagtccctaccctcaccagatgaccatgatgaaggccttctttaaatgtgccctttttctccgtgttcacagctggagttccattgcaggcaaatcccctccagtttcctgcacctctgctcttacctgtttggttgtctagaatattctccagaatctatctttctgttgagtaacttggggcttggcctctgtcttaccttttccatttcacatgctgttggcagaattgggtgtcatatttctcttccagttttgtccctgtgttgttgagtgcagagtctagggccaggtggaatgtgtcatcttgtgaggaaatgtgtttgtgttgttttttacttaaaaattgtcagcgtagtggagaggggaatgacagaagtaggaaggcaccccaccattgtgtagtgaggcagtatacagagaggtaaggcagccggggcagatggctgcggccctgcacggggctttttctggatctggttgcacgtgctgtgttctgagaggcgaggttagagcccagatcatctctattcatgtgacacagccattcccaaaaggacttagagcagagggaacttgacccccatcttaactgtctcttttgaggatgagcagagttctcaggtgtgcccccagcctggtttatataaatgtagctttaatctaggtgtgagcagatgtctgttggggatctctggacaccaggcctactctggagtcagagaggggacccgccatttggctctctggtacagtgtggacagtgtctgctcctctacttgtcatggctgaaagtactgcagctgtcatgacattctctggtgtagaagaaagaacttcccagagggtttcctggcactgcagaaagacccagaatgagggaggccctgggacccacagaggcccctgcaggcatttcagcacgcctccctccgctctcacttgttcctcagttctctcagaaatggagagaaatgacggtccttattccttctttttttacaggtgggcagatggaagagggtcgatgttttgctcaggatcacaaacagaggtcctgaggctccctctcctcactaggatccaccctcccccaaagcaaattttccttttgcctgttcactctgtgaagagggctccttgccaagtcacccagcatcccctcccctcctcctcctctccttccagcccaccctcatctcaggcaatcacatatacaggtaacaggtgttctcagcctcatgaaaaacccatgctagctgtgacattgaattgctgggctggcagacatctgcggaggagcaaaaggcatatttgcttcttcctgcctctgcgcggtgccagagagctaaagtcatggtctaacagggggagcatgctgtctgagagaatgttctgctagcttccagatgcacaggtttataaaaataccaccctgccatttaaaacatgtttaaaatgttgatagaaaacaatgaatcgtatccttagaaagacagaccctagtgaaagaaacactaactcacacaggtagggtctagcttccataacatttaagtttattctatggaattgttcattggtgctcctgttttagttacttctccatagacttgtttttcccttgactaatcaatgccatctggtgccaggtggtatcctgggtgtagcacagtgacagggtggagactgccctggccgtggcatgtgcagggggcgttcttgagcctgtcttctgggagccctttcttttcctttttccctcctttaggttgaagacttcatcattccctgcgggcagtttctctgtttttcctattttcttttcctcaagaaaaatgtaatttttaagtaacagaattgttttctgtgttgcagcatttaagttgctgagttgagaaatcatggctgagtttgccaagtaaagtttttaaagcaaaaaaaaaaaaaaaaaaaaaaaggagggagggagggaaggaaggaagaaaatatatgaacttgtttgtcagaaatacattttgaggcttttactaaaagaaatgggctagaagacatttgggggttagggcctgactgcttccaggtcctggacagatgttaccttctgtgcctgtagtcagcagttacctgaaggacaagccgagcctggtctgggtgtgtgtgacccaggagtgggtgcccctgaactgggtgtgactcctctgccacctctgttttcttacagccaagtacatcgtgcaagtggatggtaagatagggctgttccgaggcctgagtccccggctgatgtccaacgccctctctactgtgactcggggtagcatgaagaaggtgagcccacacaaagccaggaacagtcgcccgaggtttcctcatactcccagccacccctgcagcagccagttaccctggtcttgcctcctccttcccagaccattgggggcttcactccagccccatgggggagctcccaccccacagttctgctttcccacagctgtgacaccagatagtggctttcttttccccccaagctccagacctggaggttacctgaggtgggcccagccaatagacactgcagaggaaatatttggagctggttcctgccgcccaagtccccgaagagttccatggaagaggcgtagctgaacttggttctttcccttctctgtttcaggttttccctccagatgagattgagcaggtttccaacaaggatgatatgaagacttccctgaagaaagttgtgaaggaggtgggtgttgagagttggagagggagaggtgcgtggaggggagcctgatgatttctcacccccaagttgggcgggtcattgacaagtcgaagagttgggtccttgtgtatgcatgggtgggatggtaagggaagaagccctggcctggatgtgccgggaaccccggaaagccttctcagccattgttgggcctagcctgggacccgacagcactcctgggtgggggactggggagtgggcaacaggtggagccatccttggcagaccgaccccatgtgcagtccctgggacaggtttctccctcctgagcacttgtagctcccctcgagggccagttccagagacaggccgagggtggcgagtccccaccccatgctctcttccagacctcctacgagatgatgatgcagtgtgtgtcccgcatgttggcccaccccctgcatggtaagccaccccccttcccccgagactgtatctaagctggcgtcgggggcgtggggtgaggggcgccccctcgtggactgtacatagacagccgtagacctgttgggaagtggtagtggggttgggggtattctactggaacccacctcactgaggagagattggaattctttccaaagggaggtggggctcttcccaggcagtagaaatggcatgctgtggtcatggggtgtaacagggaatccgaaaggccctcttcctctcctgctctctgaataggccacgttgttcagtggccactctgcacctggcacccggtggctggagcattatgaagtgtggcccaccacatcacctgtgtgtgttttcttttttttcctcagtcatctcaatgcgctgcatggtccagtttgtgggacgggaggccaagtacaggtgggtaactcttgggactggcagagtggccctgttaccctttcagagtcggccagggcaggccgtgctgggattggttgctgcaccttttctgccctagtgctgtgtgagttcagcctgctgcctggcttctgaggaatgtggcagtggcttcaatagtctgtccagggtcattttctcttcgtcatctcttatcaagggcagccctagatgagcctagatgcctttgcagaggggtgagtgggattgtagtcagcttggattaggatttctggccccagagctgattctgccacttaggactgagctggggtctccttttggactcccgaagtaatgctctaacgatttttccggccctcataggctgatagctctttttatcccctatgaagaagccatccaccccatgggcttggggctcatcccttccattgtgtaccagaccctcacctagatctgctgcgtgcagccctgggtaggtgccaggggcatatgtgttgacacggaggtgggtcttggaggcatgtgtgaaggacacacctgggttgcccttcctctcttaagattctcatttcctggggtcggtgttttttgcagctgtcctgcggggccaccatcccaggaagctcagctgccatggtgcctcattttggggtcattaatgggaaattggcccattcccctagactgattatgaggttggtagttgggaccagaagggtataatctggccaccactgttctgagtggtggggccgggcctggcagggctgggatgatctgggaccggggctacccagggctttgccttccactggctccctctgttagtaggttgttattgagcttccttggcatttcacacccaagaacccacagcctgtcctctcatccagcttgtcctctcatctctaacagggtgcagtggccagggcatgagtccccggctccctgctgaggagtgccagatgtcttctcctaggctggttccagtgcctcctcctgcagggccctgtattctttctctgccctctgggaaagtacttctctttgcttactaccccctcctactcttactcttgggcgggcctgtgggctcctctgctagagggttgtttaaccagagataagtgtgagggccgggtaagagaagggcctgccgcctctgcagcagtggcccaagttaggagatgcattcctaaactcctatctcccagaaaacaccagtagaggactgctagtgggctgctcccatgggtggttgggcttccccagtctccatgaactgtgtaaactcctcctcaccctgaacaagcgctctttgcctttctacttggttcttcatggtaatagtcctccccatccctgccaggactggctggatttgagcagaactggtgggctcagccccacaccaacgggtgggcttctggtaggtgactgcatgaccctgtatctctgtcttgccttcttcacagtggtgtgctgagctccattgggaagattttcaaagaggaagggctgctgggattcttcgtgtacgtgagtttatacaccccataactggccacgggcatggctctgctaacaggtgtgtcctcaacctctcagaccgcagctgctggcctgggacttcactacatggccctgccctagcctgagtgctgcagccagctctccagagctccatagcgtgtccaagctgcttagcccttttcaggccatggctcatgtaaaagtggaactgtgtgtctagtacatgggggagatgaactgaccagccccactgggcctcatccagttgtggtgggtgtggggctggtcttcatgagctaagtcactgcatagtccttggcctcactgctaaaacatgactgaaaatctgacttggactgagggtggagctctggaagctcacaggctgaccacagccagtggattctgtttgacattgcttttctgacaaattagttgttgccgttaacatttaagatatgttgcacaaaaatccacatgtctggcatctcttgaaaagccagaaaatcttgtcctgctgagcggttctttctgtagagcatccatcggccaggacccaggacctgcttctttggcagggcacatggtctccgagggccgcagacaccctgtacttcgtcacgtcacatccagtgtacttcacctctaaagaaagcacatactgaaaagactaagttcagaaagaataaggtgcagacagaagccaggcttgatgagttgtattttgatttgccgttttaaggtctaggcagtgacatacatgctgataagtatgtcacaaacgtggtagacacatggtatacaacagtatccgctgtactagatacagggctccatattattcataagaagtctttatatcatggttttccggtttgtgagatgttttttatttatggccccttgtttaaccaattagtgactacttgtaggtgcatgtgtgtgtatatgatatagaaatatatatacggttctcagcaggaggtgattttgctccccggggaacatcggcagtgtccggagacatcttgtggttgtcacaactggcatctagtgggtagaggccagagacgctgctaaacatcctacagtacacaggacagccccgcaacaaagacttattcagtcaggtgtcgttgcttgcatctgtgatcccagttagttgggattagtctcagtggtttctgcagctgtcaggagaccaaggcgggaggattacttgaggccaggagttcaagaccagcctgagcaacatagtgagacttctgtctctacaaaaatgtttttaaaaattagttggccgtggcggcatgcacctgtagtcctagctacccgggaggctgaggtgggaggatggcttgagcccaggagttggagactgcagtgagctatgattgcaccactgcactccagcctgggtgatagagtgagaccctgtctcttggggaaaaaaaaaattattcagcccaaaatgtcaatagtgccaaggttgagaaactctgatttatattcacacacacacatatatgtatgtgtaagtatttatacatacatatatttgcacatgtacctggtaacaaaccaacatttgtgacatacctatcagcatgtatgtcaccgcctagaccttaaaacagcaagtcaaaaaacaactcatcaagcctggcttctgggttctgtctgtgctttattctttctgaacatagtcttttcagtatgtgctttctttagaggtgaagtaagttggatgtgaggtgacaaagtgcagggcatctgtggccctcagggaccatgtgccctgccaaaggggcagccccgggaccccagccaatggctgctctacagaaacagccacccatcttgaaacactgcacatgaccacctctggcatttttcacactgcgtagttctcttctggtgtttgaataggattcccgcacaacagatgcctactctttgggttctttctccccatgtgattttggaacaggtgatactcatacatgttacagtgcatagaaagcaccaaagggtatagcacaaagtcaatctgagcacaggcagggacgacaagattagaaattgcattcacagaggttccttttattaatactcttcatagatgtattacatatattcttttgagtttttcaaatataagatttttttttttaattcaaaaacaaaaattctgcttctcctcccaggagacagccatccttctcctggcgagcctcccagggcactctgtacctaaacaagcaaacacattgtaaaaaacacaagaggcacatgggactcactgacctcaaactggccttttgccctcagcactgcatcttggggaaccttccttagcagtttatagagctgtttatcctaaaggccatcacttaaaaagttagccctccttgtaaatgcttgcatagaatctttttgatagaatattttcaggggcaaagagaacagatgcattgagcagtgtgtcttctgagagttggttaggtaaagaggccaggagaaaattaccaacacgtcggcactcttattatctgcatttggaaattccaaatttggcagtattcacatcttgatccctggcttctgtggtttgaaaactgcttgagactattagctaatttatggcatccaaagcggcatagaacacctccccatgggaaaaggagcactatcttcccagtgtgcatagctgctggaccctgcaggcctcctttctaaggctgtgccattggatatgctaagattttgagctcggaacatccctgcctgcttcctgggtgtggagcccccaggaactgctcctctccctctcctgctcatctctgcttaccttgttttttagtggattaatccctcacctcctgggcgatgtggttttcttgtggggctgtaacctgctggcccacttcatcaatgcctacctggtggatgacagcgtgagtgacaccccaggggggctgggaaacgaccagaatccaggttcccaggttggttggaacaaggacttgtccttctttccgtgtgctgctgatgcccagggtctgggacaaactcaaggattctgggattctcagcatcaggccgggagggtgagagaggacctctcattatccctggagtcatctttgtctaaggggagaacggcctcaagaggcgagattccagattagtacccagacctgggaggaattaatggaatgcttgtccctgggcgccttagaaacagaccccagcttatctaaggctgctccgaggcagtgacccaactagggctcaggaagtcagaagatagaccagctaatagtgatcacctcttgacctttgtgtcacgtcttttgctttttaaaacccttttgtgaacgttatggcctttgatctgacggcatcctagttgtgaagggaacagggcaggtataatgttcgtttaccaatacagaaatcgagacccagagatcacaaattctggagaggctctgggctctccagagtcactcagctggaactgacagggctggaattagatccctggccaggccaagggtgcattcctctgagttttttcagatctgctaggaagtgtacagtccgatacaccctcctattttgttagctgtggtctacacagcctagtatacatagacctttcagcaggtcgggtcaggcataggaaggcctggtccttctacacagcacttgttgaggaaggccatccaggtacctgaggggttgactggttctgcctgaaccaagataagaggtagggagcagcgatggctgggaattgcagtgtccagacattctcacagtggggatcaccttcaagaaggatggcattccttcttgaagtggctttccctcccaggaggctaggagggcctggggacgtgtctgccagaatcacctgggtgggaagggggtcatgttcagcatgtgtgtgtgtgtggtacatgtctgttctgtgtggtgaggagtgccccatcccagatgggagcctctgcttgcagggagactggccacttgacctgggcaggtgagtcttcactggcctttcgatgtaagcaaattaaagtggctccatagagacccaccccatctgcaatcacagtggtacattcctgcagttctgccccttctcggggggccttgtgggtgggtaagctgctgctgtcacatacagagcaagggtggccaggagtgcaccgctaagtggtttctcatctaggtgggcagctgtctgaccagaggctgccgtgcttacatcagcaacaacagcagtcaacagatttgtctaaagtgtttttcgagtgcttttctgtatgtggcttaaaggccgaggtgaggctgccgggctgtcaaagccactcaagcagacatctgagcaaatctctgaccaagaacccaggccatcgatctggtgggatggccgctccacaggaagctgagggtgggggagtcacctttcctcactaggagctgtttgcttcagcaaagcaggatttgaggagttggggtctgaagggggaaaagcttgctgaggtggaggtggcgataagcctggacttgccctcacctcaccccacaggccaggattcgtctttgggtttcagggtgcatgtctgtcttagcactgactgcgtgccaagccctggatgttgatcaggcagacacgggctcagcccttgaggctcacagtccggtgggttgcacaggcagcggcagctgatccctcttaccgggtctccttctcgggactcccttcagtccacttaccccgtttctgccccccaggccttctctgggcagtgactgtgagggctgacaggaaaggcatgtgcagcgtgcttgtgaggagctcagcacagagggtggggtgagggcatgtgttgctgaagtctgcatcctgaggtgcctgtggcaaaccactcttcccttctgtctcctcagttcagccaggccctggccatccggagctataccaagttcgtgatgggggtaagttgtgccagctgtccttccttcccactgccttgcggacccaagcggggcctaggaggccaaccctggtaatggctggaggcaggtcttggtacagggtgttggcgtggtgtgtccctgctccctgggccggggtgggtcactggcactcaggcctctctgggtttcagattgcagtgagcatgctgacctaccccttcctgctagttggcgacctcatggctgtgaacaactgcgggtaggtgtgcgcccctctacttgccactctacctaccaaggctgtggggtgggggagacccaccgagcccttccagcactctgccccctcccacctgctctgtgtgtaggcttggcctgccaggcaccctggcttccgctgggatttcccagcaccccctggggtaaactgtggtgtcaggggtcagggtgtggatgggtggtagcctgaaggcattccttcttgaagtggctttcccgtggctggctgtcttccactgttctctgcatctacactctccttctccggcaggctgcaagctgggctccccccttactccccagtgttcaaatcctggattcactgctggaagtacctgagtgtgcaggtgagcaagcactggacggcggaggcctttcctgttctttgctacatccttcagctgaaatggttttgtggatgcttcattgcatgcaaagataagtggtttcatggaattcaatattgtgaggagatacttggtatctataaggcatttaagttttcatcttacataatttcagaaaggatttgaggtggctaagtgtgggtttattttaagattatacatcagacaagaccttttcttctttgagtcttaaagactcttaggataaggataagagaactctggcccaggtggcaggtggtaaagcccaagaactgcttctccttcaagtaacatgggctgaaaattcgaggtctgtaaccagttgagctgagttcctgggttgttagggcggctggcattggaaaccgactcctccctcctgcaggacattcctgggcccaggagagcctgtgggtggggctgggccacgtggggaactggcagcagtaccaaccttgggttctcgtgttctgtaccgaagctacctctccgtagctggagctcttgggcccagcagtcaggggtccaggctttggccgagggcagaaccttgccttttcctggccttgatttgcctcgcagtgaaatggggcagtggcccggagggagccagaactctgagtggcctcgaggctgagaagaggacagatgggagggaagcagggaggagagccgcagttcttcccagtggccctggtcagcgtgagtgtgtctcgtcctccctatgagcactgaaagagtcctagaccacttgggctctgaagcaagaggggcaatgagcctcctctctagggctctcctacagagtagccccaaagacacccctgggcaggaaatgaaccgctcccttctgcttcaacacaggcagattctgccctccagggatgtaggccgaggccgtccaccccggagctgggtctttgagctcctggacccttctttgcctgacactggccttcctctcggagggacaaggaagcgtggcctccctttcactcaccttacttttccttctggtccagggccagctcttccgaggctccagcctgcttttccgccgggtgtcatcaggatcatgctttgccctggagtaacctgaatcatctaaaaaacacggtctcaacctggccaccgtgggtgaggcctgaccaccttgggacacctgcaagacgactccaacccaacaacaaccagatgtgctccagcccagccgggcttcagttccatatttgccatgtgtctgtccagatgtggggttgagcgggggtggggctgcacccagtggattgggtcacccggcagacctagggaaggtgaggcgaggtggggagttggcagaatccccatacctcgcagatttgctgagtctgtcttgtgcagagggccagagaatggcttatgggggcccaggttggatggggaaaggctaatggggtcagaccccaccccgtctacccctccagtcagcccagcgcccatcctgcagctcagctgggagcatcattctcctgctttgtacatagggtgtggtcccctggcacgtggccaccatcatgtctaggcctatgctaggaggcaaatggccaggctctgcctgtgtttttctcaacactacttttctgatatgagggcagcacctgcctctgaatgggaaatcatgcaactactcagaatgtgtcctcctcatctaatgctcatctgtttaatggtgatgcctcgcgtacaggatctggttacctgtgcagttgtgaatacccagaggttgggcagatcagtgtctctagtcctacccagttttaaagttcatggtaagatttgacctcatctcccgcaaataaatgtattggtgatttggagttttt

SEQ ID NO: 310 - DNA, 309 bp, Homo sapiens
gagtgtcctcctcctcccgtcctgggaaacctcatccaatgggcaaagctgaaagggcctctgacaggcctttggggacctccttatatatatccttacgtatatacccaagataattggaaacttaacgttcacacaaaaactggtatatgaatgcttagtagtattattcgtagtagctcaggagtggaaacagcctgagtgtccgatgacaaataaaatggaaatgttctatagaatgtaatgaatattccatagaatggaatattacttggcaataaaaatgaatgaagttccgattcatgctac

SEQ ID NO: 311 - DNA, 577 bp, Homo sapiens
tccgttcaaacagaaacttttattgcgaacccccaaaactagcacggttctgttgtaggtgttgttgcagagtgtcgggcacgtttacaaacaggaacagggcacttgctgtcctatcttcctcgcagggttcttgtgacgattacacttaaatcaacacgtataaagcattttaaaaagtgcctgtcacatagtccctgcaatttaaggtctagttgtgattattcacttgtattaactaagaatcaactacaggcgcctagcagtgcctgcatgtgctcacactgaggcactcactaaaaccctcaggatctagtgagggagacagtcaaatactttagagcaaaacaaattttacaaccacggactctgaggaaggcgtgcgaaggctccacagctggggagggtgcccacagtcgccgaggggacatctggatttgctctggttgggagagcattcctggcagaggagatggaaaatgcgatcggacaaagaggctgggaccgcggaggggatcgggctcggggtcggggctcgtcctgcagcaggagattcagctcgcgcagagttccacgc

SEQ ID NO: 312 - DNA, 1044 bp, Homo sapiens
gaagagtcagccttcttcttttcctggcctaggtagtagagctcatatagaaaaagtgagacaatattggtaccaaactacattatttattgcttccactgaactggtcaagaggcagcaggtgaggcatgaagatgggcagttctcagaagttttcctgaacctacaggtttatgttaatttttttatgtataatttgtcttccttgtttatgatctcattctagtctgccatgtaaccccttctcaaactttaaaaggacctcccttgagctggagctaacgagaccatttcttgtctgcttacaattttaaaaaaaaagctatttgcaagtaatttttctcattatgatgctgttatcataaagtgagattccagtagccagggtgtcaagggatggtatatggacagtgcaactttgacttactttactctacttagtcaaattttaactattttctggttcctttcatttgaatataatagttaaaataatgcagaccattcacagttcatatgttctccctttgtttttctctgactccacatgcactgacatgtatagtttctgctgaatttattaatttggtccagtttattcctgctgttaactttgatttcttttcctcctcttatctaatatttttcactatgatcagtatgttccatgaaatatatatattccttatttttctctcctaaagtataaacaaattgtcattgggaaaggagaacacttttctctgactcacataatgtagtagtaatcattcatattttacttatttgtggctgcataattgtaataggaagagtgtgtggccaggtgagcgaagccagaaaatatgttgcttggtagtttttccacattgctctcaaattttcatatattttgcttatttactggcccgtgtgtgacagtagtcacacaaatagtacctattattgtctaacttggggatgccatggggaaggtgtagattttcttggcactggattctgcaacacttgattaatcttaattctatggcaaaaaaaaaaaaa

SEQ ID NO: 313 - DNA, 1047 bp, Homo sapiens
gaagagtcagccttcttcttttcccggcctaggtagtagagctcatatagaaaaagtgagacaatattggtacaaaactacattatttattgcttccactgaactgtcaagaggcagcaggtgaggcatgaagatgggcagttctcagaagttttcctgaacctacaggtttatgttaatttttttatgtataatttgtcttccttgtttatgatctcatttctagtctgccatgtaaccccttctcaaactttaaaaggacctcccttgagctggagctaacgagaccatttcttgtctgcttacaattttaaaaaaaaagctatttgcaagtaatttttctcattatgatgctgttatcataaagtgagattccagtagccagggtgtcaagggatggtatatggacagtgcaactttgacttactttactctacttagtcaaattttaactattttctggttcctttcatttgaatataatagttaaaataatgcagaccattcacagttcatatgttctccctttgtttttctctgactccacatgcactgacatgtatagtttctgctgaatttattaatttggtccagtttattcctgctgttaactttgatttcttttcctcctcttatctaatatttttcactatgatcagtatgttccatgaaatatatatattccttatttttctctcctaaagtataaacaaattgtcattgggaaaggagaacacttttctctgactcacataatgtagtagtaatcattcatattttacttatttgtggctgcataattgtaataggaagagtgtgtggccagggtgagtgaagccagaaaatatgttgctttggtagtttttccacattgctctcaaattttcatatattttgcttatttactggcccgtgtgtgacagtagtcacacaaatagtacctattattgtctaacttggggatgccatggggaaggtgtagattttcttggcactggattctgcaacacttgattaatcttaattctatggcaaaaaaaaaaaaaa

SEQ ID NO: 314 - DNA, 1047 bp, Homo sapiens; identical to SEQ ID NO: 313

SEQ ID NO: 315 - DNA, 3640 bp, Homo sapiens
caaggtgggggattgccagggggagaaaacttatttattgctgtaagacaggacccctcctcccaacctcataccccaccgcacaccagagctaaattcaaagctgaaaggcgcacgtttctatacctacattcattcctgagggaccctccagagggtcaaggtcccagccccaggcagccctgtcacagtgagaagtagttcctgtccttaaggaatttccttctaatccaggtgcttgggcaggaacccgatggccttcgggtcaccaaggctgtctgggagggaggcacagggccgccctctgtgctgaggccgtggaggaagccaggaggagggtggcttgctttgcttccttgtctaattagcttgcttgaagatgtggccttggcagggagccagacccatggggccaaggaagaggaagagcatcctcaatagactcactcccccttccttggtctccacgggccccgtggactgagggctgcattggggtcttctgcctaggggaagtgctggacctgagctggagccacttggcttagaagccacaggattcacttttcactggcctttgcagtccccaaaggatcaggtctcagaaccaaggctccaaaggctgaggtctccccagttcctcctctcagaactcccacagtagctcagaggccgggggtcctgccaactttcatttggaaagttctttcgaacatctaaactagatctatcttagggtttctttctctcctagataggatcagctcccagccctagccattaggctgctggtcctggcgggggatggggtcccctcgttacccagtccttcccagggacccaacttcctaacacaacctggcttggacatgaagaccctcccccaggttaccttgtaaagagtccctccagagctgggatcccatgggcgcagcagcacacccagctcccatgcgtcactccctagctctgtcccagcttttgctatcattgctgacttttcctcctgtggctcatctctgtccctgctctctttgaaaacctaaactaccaaggtgtcatgctgcaactccctgcccagtcctgcacaaagccttggctgtgtgtggcaccccttgcctcctaccccagagcagctggctccattggcttctccctgcaccagccctgtcctcaggggtcaggaaaaagcagcacagctttctttcctctcctccagaggcctggaagggaggtggaggtccagtaagggcctggctgccttggatttcttggtcctgccttgccaactgcaccctgtagctcctgctccctgtgaccccagaaccagaggtgctgccttccctgtctcctagacaaagcacaaagggatgccctgcttggcttgagcctgcccaactgaaggattttctctgccccagggaccttccatccctgaatacaaggctctaggcaacttctctctgggtggtacacactagaatgcctggcattagccctagaaaggaggttggggtgtatgggtagtgagctagggtgggagaaaggtggtgctgaaaggacagatgctagttgtagtttcactcactcattcattcattagtgcaacagtactgagcaccacctgcactagaggcagaggggtgaacaagatacccttctgcctggggggacgtccacttcccatgggtttggctatttccaggaaagcccctcagtcctccaccctgttctggctgtgtgtgaaggatgtgtgtgagcaggcccaatcctttgcagcaagaatgagaggtcagagtattccattgcacacgcaccctggggctgacagacttgtgccccctagccttcatgcatgcccaagcactggcagctttgcagcccctgccccaccagccccttgacgctcttcttttgttctctcctcggggatgagctctgctgctgagtagggagcttttgcttgctgggaggctctatgcatggatttttttggtgaccatacagctagggctgaggatgggaacagggacagagggcctggctatccctagaagcacttcatccatctttacccacccaaacgggatcccttcacatctcatacccagtaagatgcaagaaaggaatatctgagagcaagcagccctgctccaggggccccaggtatgtgtagaggcccagtgggggtggccacttggtgtttctaccaccccctgccatccagtctggccccagtacctacctgggaggttggtgtacttggcttaagtacttcatgctttattcaggctgcttccccacagcaccggcaggaaatgaaggtgcacttatatgcatccctgcaggaataaagagtgggtggcctgcccagcccagcaccacagcctttccccagccaggagagaccacctaaggatcaaggcagctcctgttttcttggttctgtgacactcgagtctgagccagcccctcaggaattgcctcaaaagagaaaaacaaaaaaaagtcctccttcccaaggcctgctactccaaggtttggctccatcccttgcctttgggtcctgcctatttccccactcctggtctcttatctttggggccaccagtggggagtcacccgggccccaatccctctaaggcgctaagttgaaggaggccttcccagagtgactattggtgccaaagtcccagttcctgttggacttggggtaaaaacaggagatggtgagtgggtgtaaggcccaaatgcccagagaagttaactcgaacccatgggacctgtcccagcctgtcagtccctgatgagtgtaacttccttcccctgggggcctggcccttctctccaacccagtggccatgctttctcacccagccttgtgcccggcctgcatttctgtatatattgctgtgtattgtgtgtatgtatgtattcctggacaagtgtgttcatctgcagcccttgcctgaggataaggtttaggattgggtaaagatcagaataccagggccagctaaggcaacgactccctccccaaacccttgggacctcagccagtcccaaggctgccctgacaatcaggcaggctccccaccgtgagccaagcctcctctgccactgccagcatggcccaagggaggcttggccttgcgcttgccagcctcagctctgccctgacaagggtcttgtatccagggcagaggcctgaggtgacccaggcttgctttgtggctgatgccagcaggcttggttctagtgggcaccactggtgggcaacctccataactggcccttaggcctaccttcctacacagctaggctataatgggcctgagtgagagggtagcttccccagccccaagcacaggcagaggggtggagagcaatttttggttttatttttgtttctgaagtggtgcctgtacctccagcccccaggggccttccctggccacacttctctgccccacccaggcatcgccatcccagcactttgctccatgtcacccgtaagatgccctttgctgaatgtacctgagtgtatgtatttaaaaggactcacatgggcatcagagaatttatggctctgtatccaataaaaaagatggtgaaactggtctatctgccccagagaggt

SEQ ID NO: 316 - DNA, 19447 bp, Homo sapiens
aatttacaaagttatctgaagtcttacattttatttaaatagcctccagtaagaagagagtgggccaattactaccccttccttgtaaaatgaagtaaccaagccaaggagggtaagtgcacccagcagccagccagccatgtgatgggtggggtgcctctcagtgggggcggccacgacacggccccggcctgctgctgtgggagcatccacagtcgagcgggggttcttgatggtttcatctacagacacgatcaggcacgcagcctcagaggctgctgtcagcgcattgatccgcaccatagctggctcccacacgaaagcttcaaagttgtcagcaatgtcctcgttgttgatgtctactccataccatgtacccccctaaaagagtaggaaaagaaaggaggtaatatggaactactttcaactttcctcttgtaaactggtactccaaaagacactgctaggaacccgcagactctctgaacttggtggcatttcgctgaagaatactgcatcttcctatgagcatgccaggaacctggaaacacccctactcccgccaactcctccccttagccctggacataccacacaagacctctgggatcttctcccaggcaagctgttgtgttttggggcggccccatcctcaggtcacctgaggactatatatatatatatatatatatatatcaaacaatgagttctcaagataaacaggaataacaaaaatactatcccatctttcatctcattgcttcaaatagcccgattttacagatgaggcaagtgagacacagaggtaaagtgactttaagcaaaagtcctaatacaagccagaagcagggtcattcactgggtgctaagcacttaacaaacctctatctatttaacaaatggagaaattaaactctcagagaggttgaagtaactagcccagggtcacacttgtagggctctggagagcttcaccacaccagtaagcccactccatgtggtcagtatgtgcttccaggaaggtggatgcaaggttcctcctgtggtaccataagaagcaatcatactctttttttttttttgagatggagtctcacactaccacccgggctggagtgcagcggcacgatctctgctcactgcaagctctgcctcctgggttcaagcaattctcctgcctcagcctcctgagtagctgggattacaggtgcccaccaccacgcctggctaattttttgtatttttagtagacatagggtttcactatgttggccaggctggtctcgaactcctgacctcatgatccgcccacctcggcctcccgaatgttgggattacaggcgtgagccaccgcacctggccacgatcatactcttggtagaagcaatgaagaaaccctggatctcctgtgctagcaccatggctttccttctgccctcagaggagggagttggtcaggcagacaggctggggggagttgcagcctatctcctgggccaggcgtgcacagcttgagtaagcacagctcacattcagaatctagccccacccgcccaaaccctgaaccctggggagagaaaggacccacctgggcatgccgagcccgcagcttgttgagaatgtttgtggcatcaaagccagcattgtcacacagctggcgtgggataatctccaaggccttggcatatgccccaatcaacagctgctgttttcctggaatagtccttgagtaatcccgcaggtacttggagagttccatctcaatggccccgccaccagccaccactgaatcattctgcagagatcagaccacctctcaatgtaagagggcccctggtccaagcttccatgctgggccactcagtaggtcccttcagcccagaaagagtggttcttcattccttcctccatcccaagccccaaacgcccagacacagcccctatctagaacatcccaacttcaacctggtgaaccttatggtttctgactattttcaaggtcacctgcagctcaaggacactggcacaattactggaatatctgactacattagctccagtttgctaacaaaacgaagtctttttcttctgcttgctctgttgcccaggctggagtgcagtggtgtgatcatagctcactgtaacctccaactcctgggctcaaggcatctttccacctcagcctcccgagtagctgggactgactacaggcacatgccaccattcctggctaatttttttatttttgtagagacaggatctcgctatgttgcccaggctggtgtcaaactcttggtcttatgcaaccctcccatctcggccttccaaagtgctgggattacaggtgtgagctaccacgcccggctaaaagaacaagtcttagctttcaaggcaggatgacctatttttgagaaactgaggctcagtttctctaccatttgtggggcaaatcagggctcaccacaccacccaggaaagggcaggttatatagagaaggaatcaccacacaaatccaaggtctgatcagctagggagataggagagagtaggctgtgcaagcaggaggatatcagcccagtaccttgatggccctcctgacgatcatgatggcatcatgcagggaccgctctgtctcctccataaactgctcggcgccgccacggagaatgaaggtgcatgtcttggccttggggcagccagtaaaaaaattgtacctatgcccaggattaaacagtacacacatgaactcttgtctgccaccatcctactgtattgtcctcactgccagcccccccaacactcagcagctgctcttacattcttcactcaggttacccaatcccaaccttatagacattttcttggaaaggtctgcagctgtaccactagggcataaaagattgtggagtcaaggcttttagatcttcctgtaatcctgtatattatctgagctctttatggctcaaaggtgagactctgtaaaagctgtataccactttgtacacaaaggtgagactttgtaaaagctgtataccacagccaaaagatggcagaagaccagacccaggcaggtttgtgagctcggcctgggcccacggctcacctctcgcctccaatctgggtctcttcaaacacctggcatcgacccagcacatctgctgacagagcattcacactggtctggattgagcctccacaggcctagggagcaaggaaggcaagatctagcagtgaaggttcccgaggccaggcagcttcctgccacctcgtctcaaagccaattcccacgcatgcccccagagcctctacattacccgccctttcccttgacttccaggcgacccttccccctctctgaaagagcaaaaaaaaaacaaaatagaactaaaacacatcaaaggcaaacagaagaagttaaaaggagatagggacccattcaattcagcttatactccctcccctaaactagggtggcactgggtccagcaactgaactcaggagtactttaaacctaaaagtatcttttgtgggatgctcatgaaagggaaaaaatctggctggaagaatcaatatttgagtttgtccagctaatcatagcattactgctaggttctctcacaaaccagatttctggacttgttttggttagactaaagtagtttgtgctactgggcacacacacatggaaatggaatgtgtcctggaaaaaaaagagttaaaaaaaaaaaacagggctcaattcacacgccaacctgacagtacactctgttataccaggggtcagtgaaaacccttcagggccacaaaggccgagaagcagcctgtgaaaatctggttaccatcattgtcctcttcagatcctcctcaggtactcggccagcacagaacatgtccctgtcagcaaagtactgggtggccacatccccaatggggagtttggacaagacaactttggctccagaatgatggatcttctctaacttgtcatagagaatgttccactcagcatcaacaattgcctgataatcctggagagacccagaaaaggatgagaatgctttggggtgaaggttgacatatacggtagggtaaaatatacccatctgcccccaccaaataaaacatgctgattcatctgggaattaacagagataaacagaatagctactcctcagtccaagcaaataaggaccccatgagatgacttaggaatcacctgaaactccccaacacaaaagcagaaagtaaccccaaggctgagaaccacagctggtgctgtccagatgcgagaaatagtttaaactggctgaggtctagactcttctgaggtgctggattcatggagttcccaataagacccctttggccgggcacagtggctcatgcctgtaatcacagaactttgggaggccaaggcaggtagatcacctgaggtcagaagttcaagaccagcctggccaacatggtgaaaccctgtctctactaaaaatacaaaaaaaaattagctgggcatggtggcacatacctgtaatcccagctactcagaaggctaaggcaggggaatcacttgaacccaggaggcagaggttacagtgagccgagattgcaccactgcactccagcctgggcaacagagcgagactccgtcttaaaggaaaaaaaaaaaagaccccttccccaagaactgctcaaaggtgggtgacatggctacctccagaggtagcctgggtaacatcaacaatgagagcacacctgtctctgcagcactaggtctagtctagaagtggaggaactcacacttgcaccaacaagaggaaccaaaataccgggcaggctatgtagctagagagtccctgccatccccttccccaggaccacagcgtatttcaacaggtgttccctatccaaatttcctcaggtcaaggtcactcagggagaacacagagtatggaaagaagggggcctagtacttagacatcaatattcaggggggcaggaagagaaaggggcccacaatagccatgaagacccagggctctggctcagaaagctgcccatttccatgcccccaccaactggtgaacccacctacctcaactgtgtggactcttatctcagcattgtctttctcagctttcaactcgagctcgacattcaaaagggcaatcttgggattgtggtactttttgggttgcatttcaaacccagcgtaagagaaagtcttcttgaatgcaacaccagctaccagctgagaatcctgttttaaaaaaacaaacactttaatggtttggtactaacatgaaataaaatcaagctagttgtttgctggctagtgcttatccattcctgtgagcctgagctaatcatgtctttatttcactgctgtaacacagcctttctgttatcataaaatcgaagacaaatccttttttttttttttaaataacacaacatattatttcagtcaccccttaagcataaggaaaatcatctggttagcagaggcaaagcatggtaaaggcctactgggctgtcctctaagactggcctctgcagcactggccgatggataatgctgtacaaacttccaaaaagtatgccagaagaggagccaggtgtttacaaagaaggcaaaacaaaagctgtgcaatgctaccctcttctatgccccagctcccaaatctcaagtatcctcctgtacacctccatgtacccataatttgcactgcaccctccacccccacacccccaacagcatggatactatagccttgacgcttcctccctccagaagatgatgccaaaaggtcttaagaatcagaaatcccctgcataatttctaagctatcactgcagctcctcagacctcaatccctcaaggtagggatcttctaccacttgttctgcaacagagcttctctgtgggttggatttaacagcagggcataatagaaagcacactgcacccagggctgactcagcactaccgtgagacttaggttccaatctcagatcttttccttactaaatgaccgagtcatttcccacaccataaaaaagggtattcagttcaataacctttagtttctctgccagtgctcatctacaattctaatctataatactgtaacccatgggtgaagagtatctgtccccagttcctgcatcattcaaatccacagcttcctaaagggagtgatgcctgagctgaatgacagatgagcagaaattagtcaaagagaaaaaaggaaaaaaggggttctcctaagaggtgggaggcagtgttgtggaatcagagaatgaaaagccatttgaagttgctagaatttagagggtaagaaccagccagtgaagaagagagaggggaagtaggcaggggccagtttagaaggatcttacaggctttgttaatgcctggctttgtatagggaatgtagatatcagaaggctttacgcagaagaataaagtaggaaacttcaccctgcaaatagtaaataagtacaatggatttaggggatccaagactggaagaggggtggcaatagtaccagaaagagtaaaagagacagactcaataaataattaggaaatcacgaggtaaaatggaacaatggtaattgacaggctggagtcagaagggttttcaaggatgatcccagatttctggtttgagtgactgaataaacggtggtgacaccaactatgacaagaaatacagaaaatgctatcacaggagtggaggacaagataaagcgtttaacagcagttagacacaagaaagagcatgaggctcagaggagaggtgagtactaaagatatggatcagaaaattcccagttaaccctggtaacaagtaaataatcactaccactatttattgaattctgggtcaggtttgtatgtatttaacgaatgtaggacagtctcggaaaaacgcaagtgtggcttagagtccctggctctcttgccaggtaagattattagtcctgatttctaatctatgtagattagaaatggatgccatttctagattagaagtggatgccaatctaatctcaaccatttatggaagtaggaaggcccaagagaagatgaaaaatcgctactaaagcagtgagtaaagacaaagtcagcaagccatgatgaagatagggaaatggctcagatgacctccaggttcctcacagctttattacatacagagaatctcagcccactggtctgacatgtgccacaataggaggggaaatggcaaagtgggaatgcaatttgggagggtaaaatttaaagagaagggccaggctatctttcaagctggtcctcctctatccaaatcgcttcagttgaggtcactgacgaagagtaataagtaaagcaggccagagactgaaaaggccaaaagcagcatggagataccaaggacgtttccagacagatactactgtgttaaaaagaaggagttgtgctgtccaagacagtagccactagctacatgttgccatttaaatggaaataaaattaagattcagttcttcagttacattagttgcatttcaggtgctcagtagccaagtgtggatggggctatcatattggacagcgcagatatgtaacagtcccaccaccctacagaaagctctactggagggtgctgagttaagagctacacacgctaatgtggatcaatttctaaaatatgttgttgaatggacaaaagcaagctacagaacactatataagcaatcttttgtctttaaaaaacagtatttacatacatgttcatatatgcacaaagtaattctgcaaggatacacacaaactaatagtggctgtatatggggcaggggtagtgcatgaaacacttttaactttaggccccttcacagtttgaaatatgtatcatctattcaagataaatgaatgaaagaagggcaagcttaacagtatcacttaggagtaagcagtgaactgaaaaatccctctcagatgtattaattgggaggtcattgatgatttgagctagtcctactacccctccaccacccactgacacagagaacctgagattctgaaaatcatacagtccaattttctactctgctgacaaataatatccacagaggttaccaagttcatctagtaacagcctctaatggcagtatggaaagtacaatgtaagtctgacttcctgcctaacatgcattctctttattcctgtaatgagtacccctctgccatatgaagctgtctgaagggtcaatatgaaagcaagagctgtctaggaaggccacagcaggcttacctcgagggctccaccctgtaccttcttgattccaatcattttaagctgcagcaaatcatcgagcatcatcactgcatccaccaccatcttagcaaagaaagctttctgctgggagatcagcttggagctcagagcggtcatggcacacttttccagcagcttcctctgctccctgggacacaagggcagaatctgcatcaggtcttgaaaaccaaatccctcttatctgattctactacagtgtggaggtagttcccttccagtctctaaactcagccctctccaacttcaccttttgtatctttagggcagattatcagtgacagatggtgactgcagtcaaagatctcatatgtggcagcttttaaactacagtcgacagcttcttttgtgctctgtgggctgggacacagccaagggtctggcaggagccaaacagccccaggcacatagagggattgcagcatgcttctgcatccaatttggccacaggaagtcagtcaaggttctgacaaaggcctgacacggtgactcacacctgtaatcccagcactttgggagtcgcaggtgggagatcacttgagccagtagttcaagactagcctgggcaatacagcaaggctccgtctctttaaaaaaaaaaaaaaaaacccactacagacttacactttatctgccttcttcacggtcacagcaatctctttgatcttgttaactgcctgccaagaacagaagttgaatgagtctctcatgctaaagacaaactgctgaagtggacctcaatctctcaatagtcctgagtctgttcactcccaaatcctaagcatttctactctacagctgaaaaaacacttctaggtcttgtaactgctcagaaaaatgtaaaactctatagttcagaaaattccaagtcagaaatgcagagtgggtatacagttctgaagaatcagggtgcttccaagattttgctctgggtctgcaggtaacacgctacaacgaatgagtggaaacagctgtgacacgagattaagccaaacctcctggtttactaaaaacacctacgacaacttctagcactttatatattagttatatataaaatatgcatacaaatatataaactttttatttttttccaaagtactcctcatatattatttcattttaatgtcaccactcaaattagagatagcaaagaaagtaaggcctagaaagattaaatgacttgccccagatcacaaatgaaggttagagggcaaataatagctaggtctcaatatacaccatgaggtgcttgagtatagcatgtagtagtagtatgccatgagtctcttagtccttactaaaagactatgtctacatcatagtctaccaggctgactctaacctgaggcttaaagagattaagtaatacacctcatcaaatggctacagattagtagaactgagattactaaggagatgtcagaaaatgcccaaagtaccctgttccccagtccctccacactcctgaaaagaaattccccttcctaagagaaatgtgaaggtgtccaggcccaagagaaggttaatcagtactgccataccagctgggtggctgtgcggaaagctcgaatgatgatctgggggtgtaaaccttcctccacatagggtttcacctgcttcagaaactctgcagccagcaaggtcactgaggtggtgccatcacccacctggaagatgatgacaggaaatacacgttttctgatgttcagggaataaagccctgaaactccatttttaggcacgctacccatttaaactgcatattatttaaatggatgtcaagcttttttctggaagcacaggtttttgcaataagtagaaagaagctaatggtagttacatatccatcatgtcaaacagtcctgggctaccaaattaattccccagacagccccattctctaaagagggctgatgtggacaatcaaatgtcctcagggtaaaaaattacacacatgaactgagaacttatgttacgtacaaggcattgtgatgaataaaacagtccttgtcatgcttattgtaatacaatacttaaaataatcatggtaccaagaagcaagagacaaacattgtttaagaagcaaaaggtggctgggcacggtggctcacacctgtaatctcagcactttgggaggctgaggcaggtggatcacctgaggtcaggagttcaagaccagcctggacaacacggtgaaaccctgtctctactaaaaatacaaaaattagctgggcgtgatgcgggcgcctgtaatcccagctactcaggaggctgaggcaggagaattgcttgaacctgggaggcagaggttgcagtgagccaagatcgcaccacagcactccagcctgggcgacagagtgagactccgtctcaagaagcaaaaggtactgcaggagttcctttcttttttaatagagaaagggtctccctatgttgtctagactggttttgaactcctggcctcaagcaatcctcccacctcggcctcccaaagtgctagaattacaggcatgagccactgcatctggccaggagttaaaaaaaaaaaaaggtaactttcagtcaaatcacactaaaacaaacgtcctaggaccagccaaagttctttatatttcaaaaactatgaggaggccaggcacggtggctcatgcctgtaatcccagcacttggggaggccgaggcgggctgatcacctgaggtcaggagttcgagaccagcctggccaacatggtgaaaccccgtctctaccaaaaatacaaaaattacccgggcgtggtggtgggtgcctgcaatctcagctactcgggaggctgaggcaagagaattgcttgatcccaggaggcggaggttgcagtgagccaagatcacaccattgcactccagcctgggcaacaagaatgaaaccccctctcaaaagaaaaaaaaaaaaaactactgggaataagcagattactagtctgctaatcttttttagatggtgcttttctgtgatgggatctaaatcctatttaatgagggtgaaaaagaaaaagagctttctaagaaaattggataaactctaaactggaagaaatttatttcggtagagatggggtcgtgctgtattgcccaggctgatctcaaactcctggactgaagggatcctcccaccttggcctcctaaagtaatgagacacaagcatgagccaccatgctcagcccagaaatttatttttaacttcatgtatgttcactgtgtaaggtaagaaattctcaaggggcaaaaaaaaaaaggttactatagagaaggtttaagtgggcagatttctggaccaaaaggcattattccctcgttgaagacaaaaacaaatcaaatccagactcttctctctttaattttatatatgctatacctgttttataggcttggctcctaataaaccttttaacgtaacttcaagacatacctgtagtatacatattttgcagtactctaaaatacaaaacctatctgtcaacacatttattaatactccagtgttagaatttatttttaaaagatagactggttaatgccatgaattatacacttaaacatggtattaagaataaatattatgtctgttttatcatcagtttaaaaaaaaaaaaaaaaaagcctggtgtagtggggaatgccagtagttccaacgactaaggaagctgaggtgagagaaggcttgagccccggagttcaaggccaacctgggaaacatagtaagaccctatctctttaaaaaaaaaaaaaaaagaaagaaaggcagattggaagtcttagtttacagccccattttgtaagagatgagaagtcaaattatttaacctagcaactcacacaaatgacagcacacaacctgttaagatctcaggcagtagacttatatctaaagactgttgtcattcaccaatgtattaatggatatgaaaagctacatgtaacgaaatagtatgaattttaaaaggctgttaattctaaatacttttataagcatgtattacttgtacaattataattatataaaatcttaaaaaaatttaatagaggagaactaaggagcaagcaagcatgtgtttcaacctccatttaaacacacaactattttcctacctcagcatcttgggatttggcaatgtctaccaaagtctttgctgcaggatggacaacatcaagaagtttcagaattgtggccccatcattagaaattgttgctttgccttaaaagaaacaaacaaaaatctaaagcccctttcttaaatgctgtcttcaagtgggacctagaacccatctacactttactgggatggggcagaggggatcacggcagggctgaagggaaaggatacctatctgatctttctatacagaattagctctgtacacaaagggtctaaaatcacaagcttttgcagaccacagactcccaattttccttgaagagcaattaatacaggtcaactggatacagaaaagattttttaaataaaagtaaccacttagatattcttaccacagttgataccctcacacatcaattaatataccaagatataaacaggaattttctcatcttgataacaatggaagtgaacacaggaaactccagatggttctatttcatgtttctaggccacgtctccctatgaggcaacaggctcctgagcctaggttctctcatatagtcccacacgggctcagcagtcaggacaatataagaattggaactgcttcagagtgagtcatctttcaacgatcttaaaagcagtgggatttctgataccaacctatgctagtcccaaacaccccctcaggagcctcctttcctgcacacaggcctgaggaactctgtagacttacctctgccatctacaataagcttgtccatgccacggggacccagggtagttcttacagcctcagcaatcacctggcaggcactgatgttactcacaagctgggggatgccttgggagctatcagtcccctctttcaataggataactggtgtgggctagaaaagaaagaaattaactgcttttaataatcatctattataatgagactggcaggggaaaggggaaaatgctcccatctctcccttaacagaattatctagaggtcttcttaaaccacattcccccaactgtctaccacatccattccccaaccagcctctacctccagagacactatcaaatttagcctaccctgcaggtatgctagacaggaaaatggtttgagaagcactgacctaatctaaaagaaaaaatcatgagttctccagtacccagctgaatgaccatggccttttcaacttctgaccttactccctgtgctgaggaattgggtcacaacacaggaggaagaggcagaccctgctaagtgttcattccgcagcaaaacatccacttgtctgtgttacagctcaatcttagagaagcagatgggacactgatgcaaaatgcaagatgccaagagcttgaggtgttgtcctagagatgcctaggcagtcagctttatgtaacagtgatgttcagctgcagtgtaggaaaacaggcagagaaacaaacagcacctttgccctgttttgaaaaatgatggcaaatctaattcatacagcaatgtttccatctctcatgctggctgaataaagcttctgtgtgactaatttccaatcagataccccaaagaagttttcctctttctatattgcattggtctccagaacattccctatccccgtaagggcttcatttgcagacctgctttagaaactgagaaacagggatacttgcttgttttaaagggcccgctcagatatctttgctctagtgaccaccattattagcagagagagcaatttctcagcttagcaaaccagactactttctctccacattcaaatctgagccttcagagataagcccacgaactagatccagtcttctcaagtgtttctggctaattttgtgtgtgacacagaatgtagtaaggataaatactatttcaaaacttttattgtgttaaatttgttactaggctatgattaaaaatgtatttcttactgtggaatgcaataaaaagtttgaaagccatcacctagtccttagaggtacgtggatgtctgagcaaggaaggcacaggaaagcacagagctttcccaacctaacaatgaggagtgaggaattcctgccaaagacagagtcttgccactcatgaggctgattccttattaactggtcaattccttaaaaagttcaactcttttggccagcgcagctggagggtagtaagcaagaggaagactggaataaagctgaagaggcaggcaggaaccagatcacatacacactcgtagacacactatggtgaggagttcagatttcattcctaaaaaggaaagccctgggaagctttcagcagaggaatggcatactgtgatttacataaaaaacaaaaaccactgtagaaaaaagaggatcacttgagctcatggagttcaagaccagcctggggaacatggcaagaccctgtctctacaaaaagaaaacgaaaaatacccaataaactctacggaataagagagtgggagtaatttaatatattattcattttttaatatatatttctaagagacagggtcttgctccaccacccatgctggagtgcagtggtgagatcatagcttactataagctcaagcctcctgagtagctggaccgcaatgcatgaggtaccacacctggctaattttttaaatttgtatttaaaaaatgttgcccaggctggtctccaactcctggcctctaacaaccctcctgcctcagccttctgaagtgctaggattacaggcatgaggcaccatgccaggccctcattaaatttttttaaatgcttgtcaaataatcatacattactccttttattttttattttaaaaagaatgcttgtcatgtaaacccctacatttgggatcaggcgtcaactgaagggaaaattccttccttttgctggagtgtcccaggtctggtggcaagaaatggcttctctatactcccagcattctttctggctcttcagctggcccagtccctggcaccttctgtaagggaaagatgtgtgtcctgaaaggccctaccatctcccagtcttgctaaatcattccttatggcagccccaagtcttctctggtccacccctgccacggatggagtcttacactttaaatcaaaaactaacatgagtctcaatcacttcctatcaccttcaacaggttctttcacctcaacaggttaacttacccaatgcttgtgtatactttttctcacctcaacctgcaaagtgtacccccatctaaaatagtcactctgccatcttctaccaaaaccactttctcaccaccaggccaccaattcctcagagctccaattcttccaagaagttttctctacagtaataaacaagggcatctgaataggggaatcccataactttctcttcacttgcccttgctcgcaactttttatcaccatccagcttaagtacaagctttccaaagacaaggaccaaaataaccttaatttgaagagtgccaagatttggccacacatgaagcaatattcagcagcttttggggctgaaaatccaactgctacttgtaagtgcttgacagcactggcttcttgacttttggggagaaaagcactggcactacagtaacactacatttactgagagttcttaagcacaatgcaagaagagcttggaagcagctaaccacagattccccaggttccctatgctttgcaggccctgaagaaacagcaggctgggtagagagcatctatggggtggaaaaggtggcagagctggattgagtcaagccaagacaagcaggataggtcctcttctaacagttccccagcagcaggcactgtatgcaaagtccagtttccatcccttagttactttcaacctcgctccttttttttattcctctaataaataagaaacaaggtcgggtgcggtggctcacgcctgtaatcccagcactttgggagtccaaggtgggtgaatcacaaggtcaggtgttcgagaccagcctggtcaacacggtgaaaccccgtctctactaaaaatacaaaaattagccaggcgtggtggcgtatgcctgtaatcccagctacttgggaggctgaggcaggagaattgcttgaacctgggaatggaggttgcagtgagccaagatggtgccactgcactccagcctgggcaacagagcaagactccatctcgggaaaaaaaaaaaagaaaaagaaacaagagcagactccagtaattggccacaggtataatggaaggttttggaatttcagcttactgatcttcctcttcatcctactttaaaactttcactaagcatcattaagcttaatggcttacaaaacaagtgtgtctatgccaaggcacacagcgctcaacgccacaaaggcaaggacatacattttatgcaagctgtaccaacatcacaggactgaggtttcaggggaccttttcacctctctttcgattacagaagtattctagaatatcaggggccaatttgaagacaggaagactcttggagatagaagtttcacattccaaaaatggggaggagatatcaagagccaatacagcagggaaacgtcaatctgacagaggaggggtcagttcagggaaaatccaagtgtgatgatctagagcccactggtgaagttttatcacggcagagaatggcggttctgatccctagctgtgtgaatgtgaaccaaagctcttacggaagccctggcagcgggatggactgatttcagagatgaaaggaagcaaacaaccacctcgccgagtaagagctaacattgctgagtgcttactatctgctaggcacactgacaaactgagaaccagaaattaaataacatgctcaaagtcacacagctagtaagtggcagagctaagttacaaacctaggcattcagtgtagctccagaggccttactctcaactgctgtactatgctgcctctgcacagaagatgaagacgacttcaagaatgagcaatgctagagacataaaggggagaggaagtactgttaaatgctaatttccttctaccttgggtacaagcgggattcatagggcatttggtagaacacctaaaaggtgtctgcgtccctaacaggacagagaaaagctgcaggaagcaggaaaagagcagaagatagagtcggacaggccaaaatgaataagtgaactgccaagtgcacagaaagcagtatctcagtcagggtcaaacaccacctcggaagctggccctactcaataacaacccaggagataccatcgaggcttgggacccacggaaagtatctaaagctccgagagacagagaaaagaagtgtgggaagtagggctacaaggagcactttaggtggctccaggactcacagcaactccctcgccccaaatttcaagaaaacgagacccagagttaggtagccaactagaaaagcctttcttatgtcaccagagtccgagcctgggtcttcccacctccgatacagtgtctccatctacctttcccgttctcctggctgagaggctgcaacccccagcaaccaccagggcctggtacattcagtaggcactaaagacgcgtttatttaatgactgagcgaatgagtgaatgaattaaaagtactagggaaggcgtctgcttctctgcacgctgcggtgagggtcagcgagtgaacatagtgagtccctaggcgggcacaatatgaggtccccaatgtgcctgtgccggttccaagaagcacacgtctttacagcccgcaaatctcagagcagccccagcttccaagtctagctgccgaccgcgtaaccacggccgacctgcactcgtttcacgcaagtcccgatcatgcggggctaaaaaagaggtccccgacgtgggttcgcgggcccgaagcaccctgggacttgtagtccccaaccggccagcccagagactcctctaaagccccacgcagccctcgccaacggctccagcgccgtgctcgggccgagccaggccgcggctggctggggtcgcccctaagctggggatctgggcgaggacagaggcggcaagcaaaagagggtcctacagagcaagcccaggccgagcggcgccggccaccggccagatggcagctgatggcgacggatgcgcgagacgccactcaccatcattttggaagcttattcagcggcccgccactctcccctcttctccgagaccgggccgcccagcaacccacaatgcctcgcgcaatagaaatacccagaagcttgggccgggagaggaagagaacggaccacttccgctactctatggttcgttaccaccgactcggtgcggctagaaggacctgaggctgggcttcggggactctctagtgaggggcgttcattaaagaggggtcgccgcatttcggtcgtgcttcttagagcacggagggtctttgctcggcccgcatcacctactaacttaattccaccctcctccatccccggacgccagaccaaggaatgcaataaaggcaaaagtgtgggacgcaaagtgtgggataggctggtgccaaagcactttacgtgagcgatctcatttaatcctcacaaccctattgcgttggtcctattaaggccattttactgatgacagaaaggaggctgagaggtcaaggtgtccagtgtcacagttacatagtcagtgtcaacgggacgagcgtgggaagctgcccccaatgcccgttttctggctttgcactggccagaggctcctcgtggatggcgtgcgccaggccgcggccccagcgcctatccacggtgagcgcgcaagcgttggtggcactgggcggaagaccccctggcgcaagacgagtgccttcccgtgaaggcgtggggaggagggaagcgcagctcggaggagggaagcgcagctgggagaaggctaatcgtcgtcaatcgaggcggccttggagtggacaggaccgaga

SEQ ID NO: 317 - DNA, 4387 bp, Homo sapiens
tacttcaggtgaccagaagtcagcagcttcccagaagccccgaagccggggcatcctccactcactcttctgctgtgtctgccgggatgatggggaggccctgcctgctcacagcggggcgcccctgcttgtggaggagaatggcgccatccctaaggtgcgtgggggccaggtggggccacgggggcacctggactcagtcttcagggctttaggggaaggggctcctgactgagcttttcaggatggacttgcagacctgaaaggtgcagagtaggagggtggcagcctcccctgccaggccctgcccactgtggggaaactgaattctccctcataagtggaagctttttcctaccttggtttttagagaggtctcaaagagccaagaggcctacccaagccctagagctggcaggggcaaagctgggaagggggaagtatctgttcctggggcctggggttcctctggagacggctagggggagaagcctgcgtgggaggaaggaccaggcccggagagaggcaccccagccagccccgccctccctacagcagaccccagtccaatacctgctccctgaggccaaggcccaggactcagacaagatctgcgtggtcatcgacctggacgagaccctggtgcacagctccttcaaggtgggccctgctcaacagccctcagcccgggtctcggggggcatcccccaccctggcctgggagggaggtgtgtgctggaccccatgccctggggctcctcctccaactccagcagctcttttccccccacagccagtgaacaacgcggacttcatcatccctgtggagattgatggggtggtccaccaggtgagggccaggaagaggcagtggtgggcttggcatctgcctccagaccctaggctcttcccaccaatccggagcgcctcggatgggaattggatacatgtggaatgtcagaggcccagagagggtgtgagacttgtcccaaagtcacacagaacctcaagggcttgtgctgactccaagcctgcagagtgggctcctcctctaggctcccccgtgctgtgctccctcgccccaccctgcccgggacccagttcaagtaattcaggataggttgtgtgctgtccagcctgttctccattacttggctcggggaccggtgccctgcagccttggggtgagggggctgcccctggattcctgcactaggctgaggttgaggcaggggaagggattgggaattagggacctcgtgaggtaggactggccagtggagtggaagttttgatcgttttctggcggggggtgggtacagtttccccagcagtggtcagggtagctggccaagcggacgctgcgggcccagtctccttcctgtgcgcctctgcctccctggcccatgccctgccagccctcggccacccccacactgccccactggcccgcagccccctcactggcccgccccccaggtctacgtgttgaagcgtcctcacgtggatgagttcctgcagcgaatgggcgagctctttgaatgtgtgctgttcactgctagcctcgccaaggtgagccccacaggggtcccggggcaaccctgccctcctacctacctcccgcatgcagcccaatgaacctgcgggccccaggatgacccacctcctgctcccagtacgcagacccagtagctgacctgctggacaaatggggggccttccgggcccggctgtttcgagagtcctgcgtcttccaccgggggaactacgtgaaggacctgagccggttgggtcgagacctgcggcgggtgctcatcctggacaattcacctgcctcctatgtcttccatccagacaatgctgtgagtgcgggctggactgggactgggacaggagctgagacccaggaaggggtcagtccattcaggccaccttggcctcttggatccccagttggggggtgggtgccctcccagtccttcctgcattcattgcctgtgcctgccgcccactcccctcatccacctgccctgtagccatatggtcttttcccctcgcacaaagcagagcatctgccatgcacaggggcccccacagggcaacggagtttggaaagtttcaatttttcgaattgccagttgtgacctactgatggcccacagaattaatttagtgggttctgattgggaattttaacaaaatgaaatagaatagaaaatatccggtcgggtgcagtggctcatgcctgtaatcccagcactttgggaagctgaggtgggcaggtagctgagcccagtagttcaagaccagcctcggcaacatagtgaaaccttatgtctacaaaaaatacaaaaactagccaggcgtggtggcgcatgcctggagtcccggctatgcagaaggctgaggtaggagtatcacttgagccctggaggcagaggctgtggtgagccaagattgtgccactgcactctagcctgggcaacagagcaagaccctgcctcaaaaaaaaaaaaaagtatccgagtgcttcgcacagataaggttaggaattgtgaagcttttgcattgttacgttataaatgtgttttcctggggattgctgtcaaaaaagtttgaacactgtgggtgaggggttttcagaaactgcatgatctgagtagtggctacatagggctggcctggaaattctgcacccaggaccacctgcccccctcatcttcctacacccacttccccaggtaccggtggcctcgtggtttgacaacatgagtgacacagagctccacgacctcctccccttcttcgagcaactcagccgtgtggacgacgtgtactcagtgctcaggcagccacggccagggagctagtgagggtgatggggccaggacctgcccctgaccaatgatacccacacctcctcccaggaagactgcccaggcctttgttaggaaaacccatgggccgccgccacactcagtgccatggggaagcgggcgtctcccccaccagccccaccaggcggtgtaggggcagcaggctgcactgaggaccgtgagctccaggccccgtgtcagtgccttcaaacctcctcccctattctcaggggacctggggggccctgcctgctgctccctttttctgtctctgtccatgctgccatgtttctctgctgccaaattgggccccttggccccttccggttctgcttcctgggggcagggttcctgccttggacccccagtctgggaacggtggacatcaagtgccttgcatagagccccctcttccccgcccagctttcccaggggcacagctctaggctgggaggggagaaccagcccctccccctgccccacctcctcccttgggactgagagggcccctaccaacctttgcctctgccttggagggaggggaggtctgttaccactggggaaggcagcaggagtctgtccttcaggccccacagtgcagcttctccagggccgacagctgagggctgctccctgcatcatccaagcaatgacctcagacttctgccttaaccagccccggggcttggctcccccagctctgagcgtgggggcataggcaggaccccccttgtggtgccatataaatatgtacatgtgtatatagatttttaggggaaggagagagggaagggtcagggtagagacacccctcccttgcccctttcctgggcccagaagttggggggagggagggaaaggatttttacattttttaaactgctattttctgaatggaacaagctgggccaaggggcccaggccctgtcctctgtccctcacacccctttgctccgttcattcattcaaaaaaacatttcttgagcaccttctgtgcccagcatatgctaggcccaccagctaagtgtgtgtggggggtctctacgccagctcatcagtgcctccttgcccatccttcaccggtgcctttgggggatctgtaggaggtgggaccttctgtggggtttggggatctccaggaagcccgaccaagctgtccccttcccctgtgccaacccatctcctacagccccctgcctgatcccctgctggctgggggcagctcccaggatatcctgccttccaactgtttctgaagcccctcctcctaacatggcgattccggaggtcaaggccttgggctctccccagggtctaacggttaaggggacccacataccagtgccaagggggatgtcaagtggtgatgtcgttgtgctcccctcccccagagcgggtgggcggggggtgaatatggttggcctgcatcaggtggccttcccatttaagtgccttctctgtgactgagagccctagtgtgatgagaactaaagagaaagccagacccctat

SEQ ID NO: 318 - DNA, 276 bp, Homo sapiens
tttttttttgagacgaggtctctgtctcccaggctaatgtgcaaaggcatgatcatggctcactgcagcctcaacctcctgggctcaggccatcctcccgcttcagcctgtaggagtatttgggactacaggcatgcaccaccacgcctggctaatttttaaatttttttttgtggagatgggttcttactatgttgtccaggctggtctggaacttctaggctcaagcgatcctcccacctcagcctctgaaagtcctgggattgcaggtgtgag

SEQ ID NO: 319 - DNA, 2837 bp, Homo sapiens
agacacgaatgcagagtttgagtccagatcccaaagcccagtacacaagtgtctacggagccctcaagaaaatcatgcggaccgaaggcttctggaggcccttgcgaggcgtcaacgtcatgatcatgggtgcagggccagcccatgccatgtattttgcctgctatgaaaacatgaaaaggactttaaatgacgttttccaccaccaaggaaacagccacctagccaacggtattttgaaagcgtttgtctggagttagaaagttctcttcttcaacacgtccctccccagggtgttcctccctgtgacccagccgcctcgacttcggcccgcttgctcacgaataaagaactcagagttgtgtgtgcaatgcacacccagacacacgcacgcacacacacgcgcgcgcacacacatgcttttttctgttcccctccgctttccgaagcctggggagaaatcagtgacagaggtgttttggttttattgttatgtgggttttcttttgtattttttttgtttgttttgtttttaaacattcaaaagcaattaatgatcagacataggagaaaccctgaatagaaacaaaacttttgaatgctggattcaaaaaaaaaaaaaagttatctggacagcttctttgagactatttaaaaactggtacaacaggtctctacaacgccaagatctaactaagctttaaaaggtcaagaagttttatggctgacaaaggactcgcgcaacgcagaaggcctttcccaccttaagcttccggggatctgggaattttacccccattctcttctgtttgtctgagtctcatctctctgcaagcaagggctgaaatcattttgtttggttgttttgaaggaaagaggcggggtgggggggtgcaaatctgccagcagctcttacgtaaggcatgttttattggggagggctgagcttttattttctcctctccagtggggttggcttttattgtttcttgtttgggtttggaatggaaatatggatagcagcataaagtacttttattttgacaaaattcatttttttcaacaatggagacatagatttgacccacaataacttctccccctctctttttactctgctcaaaaagcatctctcctcccattacccaaccttggtcataagtgtgcctggctggtttgcagatatttgttctgctttgtaaaaattggccattagtgcatttattgagatgatctctaaagaggtatgccctgacctacccctgattttatgacattggggcccttcttttgctgaaactgccttacgtaatggttttactccttgaaagagatttgacggaatccattttatgccaagtgctgccctgcactgtttctgcaatatgtggtgtatgctgtggtgatcttgctgggaatgattataagtgtgtgtgtggtgggggagtgggtattacatgcattgctgaagagtcatcctggtgttcctcattcctcccaccttcccgtggtcattttaattacggggcagtgtcaccgcaaagggaggaaactcaaagccgaaagcaaaattccaggcctgattctggcttttgaggttcctggttcttgaagccaggcctgacccgactctcagatggggtcagtcccgtcgctttgcagactgaccctggaaatctacaaaatgcagattttcctgatttcctcttcttttgcccagttttttttttttttttttttttttaaagcctggattgtaaccagattttcttttttcccccttctcagctgtaaatatgatatctcctttcagggccccagcttaagggcaaagtgagttaatgtgtagacaaaggcgagggacaagagagagttaacatctaaacagtggaaaaagccatggtgtgtggtttctgggaaccaccaacacttgcaggtttagctttttcccagggttgactacaagaaagaaaaccatgtttttgcaagattaaaatgtggttgagtgtgcctaaattaaccatccccatttttatcatatttccaccatcacttcagggttttaagagtcagtgctcacctgggcggagctggtagtacattttgcttcttaaaaagctaagtcctgggttccgtctgattttaggttccaggaacttcctgagaacacccgatcgcagagggtaattttctggagtttgttttgcagggatagctgggagtatggccaccctgctccacgatgcggtaatgaatccagcagaaggtaatgtttcatggtcccagggaggggcagtaggggatgtgcaaaggggcacaaaaaatggttgtgggagagtggagaggactgaaggtgggcagagcggctcctattctccagtcagagcagacaggagaattgaattttttactacgttatcaaaggcctcaagaaaggacgtgaacataagagtttttggtattcctgtgctcggagctactcaaagtgtgttttacagaccagcagcatcagacatcttgaggggtgttggaaatgctaattctgaggctgggtgcagtggctcatgcctgtaatcccagcattttttgggaggccgaggtgggcagatcacttgaggtcaggagttcgagaccagcctggccaacatggagagacccccatctctactaaaaatacaaaaattagcctagtgcggtgtgtgcacctgtaatcccagctactggggtggccgaggtgggagaatcgcttgaacccagcaggcagaggttgcagtgcaccgagagtacgccactgtactccagcctgggccacagagccagactccatctcaaaagga

SEQ ID NO: 320 - DNA, 2201 bp, Homo sapiens
agacacgaatgcagagtttgagtccagatcccaaagcccagtacacaagtatctacggagccctcaagaaaatcatgcggaccgaaggcttctggaggcccttgcgaggcgtcaacgtcatgatcatgggtgcagggccggcccatgccatgtattttgcctgctatgaaaacatgaaaaggactttaaatgacgttttccaccaccaaggaaacagccacctagccaacggtattttgaaagcgtttgtctggagttagaaagttctcttcttcaacacgtccctccccagggtgttcctccctgtgacccagccgcctcgacttcggcccgcttgctcacgaataaagaactcagagttgtgtgtgcaatgcacacccagacacacgcacgcacacacacgcgcgcgcacacacatgcttttttctgttcccctccgctttctgaagcctggggagaaatcagtgacagaggtgttttggttttattgttatgtgggttttcttttgtatttttttttgtttgttttgtttttaaacattcaaaagcaattaatgatcagacataggagaaaccctgaatagaaacaaaacttttgaatgctggattcaaaaaaaaaaaaaagttatctggacagcttctttgagactatttaaaaactggtacaacaggtctctacaacgccaagatctaactaagctttaaaaggtcaagaagttttatggctgacaaaggactcgcgcaacgcagaaggcctttcccaccttaagcttccggggatctgggaattttacccccattctcttctgtttgtctgagtctcatctctctgcaagcaagggctgaaatcattttgtttggttgttttgagggagagaggcggggtgggggggtgcaaatctgccagcagctcttacgtaaggcatgttttattggggagggctgagcttttattttctcctctccagtggggttggcttttattgtttcttgtttgggtttggaatggaaatatggatagcagcataaagtacttttattttgacaaaattcatttttttcaacaatggagacatagatttgacccacaataacttctccccctctctttttactctgctcaaaaagcatctctcctcccattacccaaccttggtcataagtgtgcctggctggtttgcagatatttgttctgctttgtaaaaattggccattagtgcatttattgagatgatctctaaagagctatgccctgacctacccctgattctatgacattggggcccttcttttgctgaaactgccttacgtaatggttttactccttgaaagagatttgacggaatccattttatgccaagtgctgccctgcactgtttctgcaatatgtggtgtatgctgtggtgatcttgctgggaatgattataagtgtgtgtgtggtgggggagtgggtattacatgcattgctgaagagtcatcctggtgttcctcattcctcccaccttcccgtggtcattttaattacggggcagtgtcaccgcaaagggaggaaactcaaagccgaaagcaaaattccaggcctgattctggcttttgaggttcctggttcttgaagccaggcctgacccgactctcagatggggtcagtcccgtcgctttgcagactgaccctggaaatctacaaaatgcagattttcctgatttcctcttctcttgcccagtttttttttttttttttttttttttttttaaaagcctggattgtaaccaaatttttttttttcccccttctcagctgtaaatatgatatctcctttcagggccccagcttaagggcaaagtgagttaatgtgtaaacaaaggcgagggacaaaaaaaagttaacatctaaacagtggaaaaacccatggtgtggggtttctgggaaccaccaacacttgcaggtttagctttttcccagggttgactacaaaaaaaaaaaccatgtttttgcaaaattaaaatgtggttgagtgtgcctaaattaaccatccccatttttatcatatttccaccatcacttcagggttttaaaagtcagtgctcacctgggcggagctggtaatacattttgcttcttaaaaagctaagtcctgggttccgtctgattttaggttccaggaacttcctgaaaacacccgatcgcaaagggtaattttctg

SEQ ID NO: 321 - DNA, 462 bp, Homo sapiens
ggagatttagggagagctgatgttacagtttgagtctgaaggcagtctggaggcacaatttcttccttgagagagaccccgtttttttctcacgaggccttcagctgattaaatgaggtgtatgtacccacagtatacaggttaatctactttattcagagtctactgatttaaatgttaatctcatttagaaaatcccttcatacatacatctaaactagtgttagatcaaatatctgggtactgtggctcatccaggctgacccataaaattaaccatcacacctgtgcaagcgcttttccctcctggatggtgtcctagggatgacagaggaggggaaagccaggtctctgcttcaaggagacaaaattatgcatacgaagaaattaagaatgctgctgtgtctgtggagtagccattcttttattcctttactttcttaacaaacttgcttttactta

SEQ ID NO: 322 - DNA, 836 bp, Homo sapiens
gcaaatctcttgaacccaggagttcaagaccagcgtgggcagcataatgagaccccgtctctatgaaaaatacaaaaattagccaggtgtggtggtgcgtgcctgtattcccagctgttcggaaggctgaggtggaaaaattgcttgagtttgggaggttgaggctgcaatgagtcatgattgcaccactgcactcagccagggcgacagagcaagactgcctcaaaacagaaaagaaaacaaaggctaattctcaggctctacaccgaaactactggatcagaatccctggagctagggaccaaaatctgtttattggtgattctgttgcatgcttttgcactattctaaaacctatgtgtgcatacacacacacacacacacacactcactctcttagcccttgttaacccttatcgatcctaagacaaatgtatggggaacccatcagaggctattctttagggctagtgttcaatttgactgtttttaatatgaaagattatggatcacatttcaaacagatgtgaacgtggagagaataatacgatgtaccgcagtgtgtccatcactgttcttcagaaattcacattgggtcattttgttttagccatctctttccacattatcttctttttgttcttttaaatttcgggggtaatatgaagcaagcctcagctgggcagaccagagtctgttccctttttatatatcccggcgtcttagccagctcgtgtctgaatagtgagtaccttttgggcctggcactgggcaggccttcagctgggtcattctctacctggcgatggctttaggtgagttgtggagctcttttc

SEQ ID NO: 323 - DNA, 462 bp, Homo sapiens
ggagatttagggagagctgatgttacagtttgagtctgaaggcagtctggaggcagaatttcttccttgagagagacccagtttttttctcacgaggccttcagctgattaaatgaggtgtatgtacccacagtatacaggttaatctactttattcagagtctactgatttaaatgttaaactcatttagaaaatcccttcatacatacatctaaactagtgttagatcaaatatctgggtactgtggctcatccaggctgacccataaaattaaccatcacacctgtgcaagcgcttttccctcctggatggtgtcctagggatgacagaggaggggaaagccaggtctctgcttcaaggagacaaaattatgcatacgaagaaattaagaatgctgctgtgtctgtggagtagccattcttttattcctttactttcttaacaaacttgcttttactta

SEQ ID NO: 324 - DNA, 1100 bp, Homo sapiens
gcaccgatgccaatacaactgctgtcgccctcaatgcgccagcccaccctgcaaggatcctaccacctggacccgcagtagccctcctactgctccgggggagctgcagtctctgttgctgccaccaaccgcataaggcgagctgcaaagccatgccatctgcaggctccaatgtaccatagatgactcctcctcttcctcctcctccagcctggcttggagcagctagatgggcaaagctagaaaagcctaaaacgggatgcagggagtggtagcattagagcctcaccttgtcacgctggccactgggtggcagggaccagtttcagcaaaggcactcacacccaccctccaaagtccagcctctccttctggcaaaagctggccaggaactggggcccagggtgagtgtgtgtgcctttgctgaaaccagccctaggtcaggtcctgctggacagaaattgctgggtccaccagggctgcactcctcagggagcaggagtaggagaaactcaggcccagccaggccctgcccacccaagttctggttcccgttcctgatgcctccacccacagtgccctatccccccacccccaccacagtggtgcccactactccctgcccagtagtcccaggttgtctctgcaacacagagcatgagagcatgggccagagaaccacggtgggtgtgggggccctgtcatactcaagattgtgcaaggaggaggagatcactctctagagtctggaattggggaagaggagaacggtcccttccttggagaccacctgaaggaggaaggaggccactgctgtcactgccacctccgcagcctgccaacgccactagcagtgtagcccctgatagcacccctaacctgccgcctgctgcctgccaccaacagtgtagcccctggatagcacaccaaacaaaccccgcaccagctgcagggtgtgtaaccccaatatcccccccaaagcaccctccctcccccagagcaggcagtgtagcacccaatagtgcccacaacctgacccagccatgggtgttgctgcactagatagcacccgaaacctgcccccccaaccccacctcgag

SEQ ID NO: 325 - DNA, 1099 bp, Homo sapiens
gagccaccaccccagcccattatctctattgatcctcactccaaccttgcaaaataggtagcgtattccagtggagaaactgaggcacaaagaggtgaaagacctttcctgtcacagttaggaaagtggcagaagccgtatttgaaccccagcaggtctccctctgaagtccacacacgtcagcgcctctgtgttgtctctttgccagcacagggctccctggagcccagagatgggggtggtgacttgaaggggttggcaagcctgggctcctccagcgaagcattcccttggccctgggcattcctaagcgagaagaggctcaatcctattttcttctcctaattggatgccttttattcctccttcctaattgaagtctggtcattgctggttgccatggcagcagccaaagcgctcatctcactgtggcttgtctctgcctgcggccaatgggaaacctcctttcccatatacggtggggacatggagtgtcaggctgtcgtattctggtggctggaggaggagaggaagtgagatgggaggaaaaaggcctgtcctctcccacgcagagactccggacagcaggatgtgtggaatccccagtctgttttcagccaggcagcaacagcatctgtactgagttgagtctatgtgtctaccagtgggctaagaacttcatgtgcagtatctcatttaatcttcgtgatggccccaggaagataagggatcaaggcccagaaaggctaagtaagctgccaggtcatccaaggagaaaatggcaaagcctggatttgaacagagactccagcttccttatgtgtagccatctcaccatgctacttctcagggggttactatgagtgtctctcatgtccccagacccagattacaggtttggaggaatacacagcccaccttcccaatatcgcaggcaacagttccaccaaatgccctgcatggcatcacagggagcctagttgcccactgctctactgctgagctcaatgccacccagcccgggctctctcgagctagcctgcttctcaggccccactgacgtcccatggttcaccattacaaccgttcccttgcctcc

SEQ ID NO: 326 - DNA, 869 bp, Homo sapiens
tgctctcgccacaggtctttctttttcaaaagcaaacagctacagtatccatcatactccagagcagccctcaaagcctgggctgttgagagtgcacatcctggcctgcggtgacagccgtcagatggtgaggggccccaggcgactgccccagcagcagggcctgggagctgcacaggggagaactcgataaggagcatcatgagcatagtgggtccattgacaacatgcagtccccacggtggtgcctaatgacaaaatgacatcatgccacctgcaaaaaaagtaaaaatgatcagaggcgagcttgtcagagaagctttgaactaggtgactgcatgaaacatctcagaggcggaagagtgcctccccctccccgggactcccacctggtgccctgagctcatcatcccttctcttgtagcatatgctgtcaatacccagggccttttcgaaacggcaatgggtccgaaggcctcgggaccacctttcacacctcccctttatgcagtgtccatacctccttggtgctcagctgctggtcagctccatgtgccctgtggtccctgccctcccaaggcctgtgaacaaatgcttagtcccagattagagtctacgtcaatctgggatgtgagctgagtggcacctgtcgtgaaccaggccagagtctacgcaatctggggtgtgagctgagtggcacctgtcgtgaacgtgcatgcacatgggcattttgtcagtctgcaccggtgaataaatgtcgctgcatttgccagctgagtgtcaccaggttccaggtcccattacacatcaggaattgtgtccgactcttctggatccgctgattggacctgagggatccctgactcgag

SEQ ID NO: 327 - DNA, 851 bp, Homo sapiens
gtctttcttttcaaaagcgaacagtcagtatccatcatactccagagcagccctcaaagcctgggctgttgagagtgcacatcctggcctgcggtgacagccgtcagatggtgaggggccccaggcgactgccccagcagcagggcctggcacctgcacagggtagaactcgataaggagcatcatgagcatacccccccattgacaacatgcagtccccacggtggtgcctaatgacaaaatgacatcatgccacctgcaaaaaaagtaaaaatgatcagaggcgagcttgtcagagaagctttgaactaggtgactgcatgaaacatctcagaggcggaagagtgcctccccctccccgggactcccacctggtgccctgagctcatcatcccttctcttgtagcatatgctgtcaatacccagggccttttcgaaacggcaatgggtccgaaggcctcgggaccacctttcacacctcccctttatgcagtgtccatacctccttggtgctcagctgctggtcagctccatatgccctgtggtccctgccctcccaaggcctgtgaacaaatgcttagtcccagattagagtctacgtcaatctgggatgtgagctgagtggcacctgtcgtgaaccaggccagagtctacgcaatctggggtgtgagctgagtggcacctgtcgtgaacgtgcatgcacatgggcattttgtcagtctgcaccggtgaataaatgtcgctgcatttgccagctgagtgtcaccaggttccaggtcccattacacatcaggaattgtgtccgactcttctggatccgctgattggacctgagggatccctgactcgag

SEQ ID NO: 328 - DNA, 147 bp, Homo sapiens
aaaaaaccagccaggcatggtggctcacacctgtaatcccagcactttgggaggccgaggtgggtggatcacttgaggtcaggagttcaagaccagcctggacaacatggtgaaaccctgtctctactaaaaatacaaaaattagcc

SEQ ID NO: 329 - DNA, 111 bp, Homo sapiens
ggccaggcacggtggctcacacctgtaatcccagcactttgggaggccgaggtgggcggatcacctgaggtcaggagttcgagaccagccccgccaacatggcgaaacccc

SEQ ID NO: 330 - DNA, 610 bp, Homo sapiens
ggaggaaagagggtggaatctggacagtatgaaggatttgtattgtacctgtaatgtttgatgtctgaagctgggtggtgggcatggctgtttgttattctccatccttttggtatgcctgatacatttcataataattttaaaaaggacaagactattgcagagaaatgcatagagtgagctctgtttgggtttttaaaatgattcctacatctatgcttgcagatgtaagcaccagccctggaaaacattgcaagggattcttagtaggcccaagctttgggaaagggcccagggggctggggagttgattaggaggggatacatgctttttcctgctgccttttgaattttgtaccacacgtagtattacttattaattaaaaaataatctgaactagccaggcgtggtggcacatacctagtctcagttacttggaaggctgaggcaggaggatcacttgagcccaggtggttgcggccagcctgggcaacatagtgagaccctgtctctttagaaaaaacaggccaggcatggtggctcacacctgtaatcccagcactttgggaggctgaggtgggtggatcacctgaggtcgggagctcgaga

SEQ ID NO: 331 - DNA, 610 bp, Homo sapiens
ggaggaaagagggtggaatctggacagtatgaaggatttgtattgtacctgtaatgtttgatgtctgaagctgggtggtgggcatggctgtttgttattctccatccttttggtatgcctgatacatttcataataattttaaaaaggacaagactactgcagagaaatgcatagagtgagctctgtttgggtttttaaaatgattcctacatctatgcttgcagatgtaagcaccagccctggaaaacattgcaagggattcttagtaggcccaagctttgggaaagggcccagggggctggggagttgattaggaggggatacatgctttttcctgctgccttttgaattttgtaccacacgtagtattacttattaattaaaaaataatctgaactagccaggcgtggtggcacatacctagtctcagttacttggaaggctgaggcaggaggatcacttgagcccaggtggttgcggccagcctgggcaacatagtgagaccctgtctctttagaaaaaacaggccaggcatggtggctcacacctgtaatcccagcactttgggaggctgaggtgggtggatcacctgaggtcgggagctcgaga

SEQ ID NO: 332 - DNA, 612 bp, Homo sapiens
ggaggaaagagggtggaatctggacagtatgaaggatttgtattgtacctgtaatgtttgatgtctgaagctgggtggtgggcatggctgtttgttattctccatccttttggtatgcctgatacatttcataataattttaaaaaggacaagactactgcagagaaatgcatagagtgagctctgtttgggtttttaaaatgattcctacatctatgcttgcagatgtaagcaccagccctggaaaacattgcaagggattcttagtaggcccaagctttgggaaagggcccagggggctggggagttgattaggaggggatacatgctttttcctgctgccttttgaattttgtaccacacgtagtattacttattaattaaaaaataatctgaactagccaggcgtggtggcacatacctagtctcagttacttggaaggctgaggcaggaggatcacttgagcccaggtggttgcggccagcctgggcaacatagtgagaccctgtctctttagaaaaaaacaggccaggcatggtggcgtcacacctgtaatcccagcactttgggaggctgaggtgggtggatcacctgaggtcgggagctcgaga

SEQ ID NO: 333 - DNA, 375 bp, Homo sapiens
cagcctacaaagaacaatgatgcctgggaaccatcgccaggctacactgttgactaacaaagccacgggccccgcaagaaacaattcagtaatttccacagggttggagatgactcagcagttccactcctgcacgagcacccgagagttgccctgatagccgtgcacttgggcgttcatcacagcatttgcttcttacatgaatttttaattttggaataatttcagatttacagagaagttacaaatccaatacagagaattcttgtatactaccctgctcagttttctcctacaattaacatcttaatcatgatacatttatgaaaaccaagaaattaacattggtagaatgttgttaattaaatgacagat

SEQ ID NO: 334 - DNA, 873 bp, Homo sapiens
tttggagctgttgggtacacctgcagaaagcctgtcacttcacacttggaagattacacagcggccaggcagaggcgcccctcacctcccagatggggcggccgggcagaggcgcccctcacctcccagacggggcggccatgcagaggcgcccctcacctcccagacgtgggcggccatgtctaggctcccctctactttcccagacagggcggccgggcagaggcgctctcccccccttttcccaaacggggcggcccggcacttggcgctctctcattttcctagacggggtcagccaatgcgataggcgctatcctcacctccgcagaacgggggcggcccagcagtggcgcccctcacctcccagacggggcggccgggcagaggcacccctcacctcccagacggggcggccaggcagagaaaggagacttcactgcccatccacgagggctggttgcatacactgcagaacatctgtgcaaaggaactggacagcctacaaagaacaatgatgcctgggaaccatcgccaggctacactgttgactaacaaagccacgggccccgcaagaaacaattcagtaatttccacagggttggagatgactcagcagttccactcctgcacgagcacccgagagttgccctgatagccgtgcacttgggcgttcatcacagcatttgcttcttacatgaatttttaattttggaataatttcagatttacagagaagttacaaatccaatacagagaattcttgtatactaccctgctcagttttctcctacaattaacatcttaatcatgatacatttatgaaaaccaagaaattaacattggtagaatgttattaattaaatgacagat

SEQ ID NO: 335 - DNA, 375 bp, Homo sapiens
cagcctacaaagaacaatgatgcctgggaaccatcgccaggctacactgttgactaacaaagccacgggccccgcaagaaacaattcagtaatttccacagggttggagatgactcagcagttccactcctgcacgagcacccgagagttgccctgatagccgtgcacttgggcgttcatcacagcatttgcttcttacatgaatttttaattttggaataatttcagatttacagagaagttacaaatccaatacagagaattcttgtatactaccctgctcagttttctcctacaattaacatcttaatcatgatacatttatgaaaaccaagaaattaacattggtagaatgttattaattaaatgacagat

SEQ ID NO: 336 - DNA, 1798 bp, Homo sapiens
cctgctgaggacatgaggacccgtctttttgcagtgccaggcagggtggccaaagaggactggactctggacctggagccccgtggtccagttcacattcaccccacaagagtttcaggaggcctcccacggtgcctgtgctgggtggcggtggtggtgccaagaggaatggaatgtcctgggctccttcaggagctctctacccaggggcaaggagagcccagagagaagcgccctggtctcttgagcttcctgatctgctcctgtcccccgctctcctccactcccttgcctttccctaggttgtcccctccctgggcttttgtgtgttttgggagatgtcacctaaccaggacattgatattcaatcccatcccccttcctcccaccctgccccactttgatttaatcctttggctgtgggctgaggcctcccagggaagctgggtggggtgggtgttgagaccccctcagaccagcacagagacctgtccttgtgcagtctgcaccctgcactccctcccttgcctgtagatgttctggatgacagtagaggaaatggacaaggtcagtttgaatatcccagaacacagtgctctgtctcctcccaccagtccagttagcttcccttctggaccaatagacgaggggagaccccatggatcctctggctgggaagccactgaccaggtggccagggggcagggtgggaagaggggttaaggtgcagtgatgatggcctgttttggagtgtgtctgagactgggattgcatttggggtttcccgtgtgcttgggatgctagagggtcacctgcaggaggcctggggccggcgagaaatctcctgtgatgccctgtgaaatggcttgtctcctcccccatcagggcccaccgaaagctcaggggagcacagaagcccatggaagcccagggagatgtccctggggcagacactaaggcaggtgttgaagacaagctgcttgtcaagaagcatttcccggcaagagaggggcaagtctggggctccaactgggtacagcctgggtgcagttataagcccctttggcttacttggtagaagatggctacttggatgtacctcacttaaagatgttttgtaccacactaggtctctgggcccttgtgcttcctgtgggtggggtgagggccaaaggctatggtttcctgcctccaggagaatggagagaaagggcttccaggcccctccaagcctggggaaggacgtggcatccaagctgagccagagggaactgctgctgtcctcccttcatttctgtggaccttggaggctttggctttgtggcagggcctccccaggcagctctgggacctaggagtttgcttctgatagggtcagctttcccatttcccttcaatgcttgggaaccttctcccttagcttcacacttgccgtttcaagccctgctgggaccttgtggcttggctggaatccaggactgtattttcatggagaagaacctgcagattcttccatcctcagctggccatggcccacagctctgcatctgcatctgagcttctcaagactcctggagcatgaggggaatggggcggggccactgctctgtgctgacgggctccgtctcggagattcttgtcctgttttttttctgttgtttttttttggctggtgctggggacaagcctgtgcctgccaaagctcccaggccaagtttgggggctggtgtttggggttgggtttggggttcaggatgctgcagtctgtgcaataataaacccgcatctgctcacgggc

SEQ ID NO: 337 - DNA, 1186 bp, Homo sapiens
gacgtgggtccttcccatctgtgtccttgttctcacgatccttgaggggcagctgaagggcttcagtttgagtgggggctgaaagaccatagagcttctacagtggagtttctaaagcaaacttccagaaacttctatgagtagatgacaatagaatcaagagcctgccctttgaggtggagtccccccagcctccaatgctagcccagccactttcttcgcttctctgagcctcagttttctcatctataaaatggggataattacagagcctacctcctggtagtgaggattacattagatgttgaggctgtagaaagcagtggagaaatggagacgagtgttgttatcacgctatggtgctgttagctctgctacaagccctcttgcgttttggtagaggatcccagggaccccaaagggatggaggtgattcagataccagttgtttagtcagaatatctcaatcagtgggggagcctgaggggatcgccacattccacagaggcttagagcagagggacttgcccaaggtcacgcacacagcaagttggtggcaggaaagcagttctcttgactttttaggaataagtactgcccatgaagttactctcacagccggtggttcccagcgagggggttggagaagaaggtccctcaaccaacagtaggctcgagttcaggcacaccctgtcctcaggagcctggctcccctacccaacccagccctatcactgatgggccatgtgctccctcactccctctttctgtgcctcagtttcctcttctgctgaggagactctaatccctgccccatggtcttcctcataggcaatgcagttgtgaggctcaaatgagatagattatggtgataaagaggttttaagctgggcatggtggctcacacctataattccagcacgttagaggaggctgaggcaggtggatcacttgaggtcaggagtttgagaccagcctggccaacatggcaaaaccccatctctactaaaaaagaaaatacaaaaattagccaagtgtggtggcgcgtacctgtaaacccagctagttgggagactgaggcaggagaagcacttgaaccctggaggcggaggttgcagtgagccaagatcaagccactgcactccagcctgggtgacagagcaagactccatctggaaaaaaaaaa

SEQ ID NO: 338 - DNA, 8125 bp, Homo sapiens
tgggagtgggcatctggctctccgtgtcccaaggcaactttgccaccttctcccccagcttcccttcgttgtctgcagccaacctggtcattgccataggcaccattgtcatggtgacgggcttcctcggctgcctgggggccatcaaggaaaacaagtgcctcctcctcagcgtaagttctgtccaaatccccagcccctccaactcctgatctccttgcacttggacccctgggacaggcaagacctggaatattagacacctgggtgtccaacctgagcccagggaaactgcttctagaacgttctaggcttgaccacacccctcctcctcatggttggttatgcctacccctggttgtccctcccactccctgattagtcagctcctttatgtccctgtcctagctatctgggtttcctcaggaggagctggcttctcccagacctgggaagccccacctaggcgccgcctgtccctgccttccacaccctccttgtcctcagccctgcccattaccacctacccatgcctggccctttcctttccagtttttcatcgtcctgttggtcatcctcctagcagagctgatcttactcatcctcttctttgtctacatggacaaggtaagccttaccagatgggagggggcatatggaatgtcactgcccttagagttgggccaagcaggccagggtcccttccctggccagaggaagagtgctggcaagcagcacctgtgcagaaaggaacatggaaccaagggttgggaaagctaccaaggaaagagcagatggaaggttttgatgggggcagcacggggcaggcaaatttggaggatgggagagttgactttgtatagttccaggaagtggaatcctctgcatgaccagagatggcagtgggctgcctctggcgctagtgagctccctctcactggaaggaattaagctacttggagaagggattcagacctcatcaggtggttgggctgggtgatttgagagcaaaccatgaaaaacaaggaggaactctctgggcgacgctggctgagcaggactgaggcacagggaagctctgtttcctgcactagagcccttgaggacgggcgctgctcctgggttcaggaggatggtgggtgaccccctgtaacctcgccaggctgggcagttcgcagtcaagagcgaggttggccgggatttcagtctcttggggcgtggcaggccctttggtaccatgcactccagaactgtgtaaggagcagttcttgaaatagctgcctgagccacactgaaagttagagacatcgttaggatgagaaagaataatcttttagttttgcactcgtgaaaaggaagaaagaacaattttgagagatttctctgtgccagccctgttcttggcccttttatgagaattgtttcccttaattctaacaacagcgccatgagtagatgctgctgttcaacatcgggtagaacagcggtgagggaggtgaaggtcacatgacctgtcttcctccctctagttcccagggtgtgttttgagaggggcagtctgtggggaagctgtgtagtggggggcgggggtggcagagtggcctgtgtgtgtggctggtcctgggatgggggagtggaggcacgtggtgtgtttttttgcctctgggtgttacagccctggccctgagtttagctctgctgggaggcggtgggtgcaccagggcctgctgtattctgaaactgggagtgtgtgcctaaccccgcacctctgttgggccagcagaggcccccaccccagtgggcagggccttccagaccagctgccttccctgccttcctcactcctcatctgtcacccaccatcctgggtgacctgaggtgggctggagagacgagctgcgtcctggttccaaccgtctcactgtgtccctccgcctggcaggtgaacgagaacgccaagaaggacctgaaggaaggcctgctgctgtaccacaccgagaacaacgtggggctgaagaacgcctggaacatcatccaggctgaggtgcgggctgggccgccctggtggggccaggcagggaggaggggtggcggccggtacttctagctgccttccccggtgacctggccgggcacctgtgctttctggattttagccgggagtggagtggtacccacgggggcatttgcctgaactgctgagtcagatgtgatacagcaaggtacagccagggagggatgaggatacaggaggggcaggcctgagagagctgtggctgagctttgggatgaatgactgaatttattttagcaacagatttgcctccatgatggggcttggcttaggtgaggaggccctggctctaggaggagaacaagtccatagtcccagatgctcccattttaagccctggggaggggccggcagggggttgggtggcagtcagcttgggacggtttacagaaagagcagaggtgctggtgggcaagcacagggctgagccaaggggcccagcccgaggggtgggctgcattgccctctcccgctctggtctccaggaaggagtgctcactcacttctccagtgggcccggctgaagcccaaagaagggacaagaagcaagccctttgtctcctcccttaactgcagggtggccacttttgcggggactggggttggcctgggcaggggaaggccctggggaggaaggggcgggccatggcatgtctgactgccccttccattcctgctggccagatgcgatgctgtggtgtcactgactacacagactggtacccagtgctgggggagaacacggttcccgaccgctgctgcatggagaactcccagggctgcgggcgcaacgccaccacgcctttgtggagaacggtgaggctggggatggaccgcttgggtccaagagcccgtgtgtggatgccccggcacggggagccctataggggaggctgggcccgggacactaagaggttggctgaatgtggcggtggggggctcacaaaaataaagccaaaagacaggtggaaaatggggggtggggctggacccacagttgggagagtcagagggcgaggggttgaatggggtctgaggctctgcagctggccttgcgggtggggcggaggctgcgccaagggatggggacagggctgaggccagggagggctgggaggtaagagtgaggacgaggtggaaggagagagtgagctgggggctgggctgcagggagcgcatgcttgggctgggaccctaacctcgtgggcctcgctccccagggctgctatgaaaaggtgaagatgtggttcgatgacaataagcacgtgctgggcacggtggggatgtgcatcctcatcatgcaggtaagaggggcgtccccagcagcctcacccaccctgctggcctcagccgcagagggaaggaagcacagagaagtgaaagcagtgttggtacacggcggagggtctggaattcatcacagctattcaagcttagcagctgtgcctgccaccgtttccgcagagctctgatatgagagcacgtgtctactcagcactgagagtggtgctcagggctgcctgtggccaggcccaggctgggatattgaagctggagtcaacccccgtgggttcccccagttctgcccaaaccttgagctcagagagccatgcaagacacacacggtgtcccccggtcaccatctttacagcctgtgcacatggcacactctctgtggtgaccgtgagaccacaccgggcttccttctgcctcctgcactcctctgggtccccggctcctttgaggattcaggagggaaggggcacaaacgagtagtgacgtggtcctgagcacacatcactggaaagacagccctgctgctgccaagacatcgcaccatgtgttccacaagcagacaagagaggcttgacaggagtcctttatttttctttttttaagagacagggtctcactttgttgctcaggctggagtgcggtggcgccgtcatagctcgctgcagccacaaactcctgggctcaagccatcgtcccacttcagcctctcaagtagctgggactacaggcatatacaccaccatacctgaatgatttacaacttttttccaaaaacagatggagtctccctctattgcccaggccgatctcaagccatcctcccaccttggcctcctaaagtgccaccgtgcccggctggcctgagtcctgaatgatccctgccacctcccactccccaccttggctcctgtgagcccccacgtagagccaggtcctccgtgcattccgtgcctgcagcgcccctctgagtaggcacacgtatgcatcctgcagaggttcgatggcttctggtctaacagccccacgaggctgagccagagttcacctgtgtgtgtctccagggtgacctctgttcacggttttcttcatgtcttcattccataagcattttcctggcacaccagtggccatccccgcttgctctaggtgccctgtgacatcccaagcctctcggggctgaggtcaggtccaggctgctgcagctcctgcctcaggcccctccccgtgtctttcagatcctgggcatggccttctccatgaccctcttccagcacatccaccggactggtaagaagtacgacgcatgagcgggctggccgggagtgcccaccccgccctgctgccctgtggagggaagaggattgagctttgtgtcgcctgcctgcgctctccagatatgacccctgcacccaccccccacagcctgccctaccccacctaccctgcctcagcctcggacttctcagtgggtggagtgccagggaggaggaggcacacggagacctggggctcggggcccctggattcctgcatctgcatatgcgtatttgccaaagacgacagggtgggctggggtgcgctctggaggaacccccggcactgatgggcttctgcccctgcccttcctcacactgacactttgtccccacatggggtggggagcagagtgcccgccccgtggagataccgccccagcgggggctgcgacatccatggccaccatggggcacctggcggggcgggggtctgccggcctctgggcaaggcccctggagcatctcgcccaggctttttataccttacaatgtaacttttttattttattttactctatgattattcaggaatattatctctcagataagtttagggttagatttctgatttgtaactttttactgtgttgatttctttaatggtttgactttttttccctgagggtgagggatgggtgggaagagaggacatctgtccagtctcaatcaggacagaccaccgtgcgacacccaggaggctctcggatggggcgcgcctgcgccctcagaacgtgtgggaaggagggggcgtggacaggacacgggaccttgccaggcctggtgtctgaggacaggagcctgggagaggcgggtggagcgtgaagcaggctggaggtgcccctgcacgggaggtggcgtttgctaaccaatcgagctggaaatgccagggcaggggggccccacggtgctgtggcagagctagaggggtccttagacttttcactgatgagcagttgttggttttttctttctcccttcctcccgctctctgctggcacgcgaggcttccccttccaccccatgtgggtattcccacaacaggttctgcacaccccagttatttcacagacattcctgctagaaactgtcagacaaatacctctctagttcggatgctgctcactttcccccttgcttctggaaggggaagcagtccttaggttttgctgtgctgggacagtggcaggggacccacaggggtgaggacccacggtcctccccgccagccttgctcagctgtgggttgccctgctgggaaggagggaatcacgtccacctgggtcccaagatcttcgcctccttccctggggccacggacatcagcagtgggttgggtggcgattatatcatctgtgatcccaaggagaagaaatacagaaaacccaagagaggtcagactggctcttgttaccggagccacgggaagaaagcagccggagtcacgcacgtgcagagctgggcatgggagagaaacgggctggggagtgaggccaggagtgggattcagctgcagcagggcgccccctccaaactgcagctggtctggcttactgttttgccgttcaaaaaggtcgcgaatccgtgggactgagcacggggacctcacccgctagccagcgtctgctgcacttgatcaggtggggccttggtgggcggctgcctttcctatacagtttgtcttgtcaccctggtttcccactggggccaggtctcttctccagcctccacctgcctgtctgatccaagagctgagacacggccacccagcaccagtcactcctctgttcaccttaagtaacacacaaaccgggaacaggaggacagaaccgttggcattatcaggattcgtgttttgtgggggtgggagtggagagtagggtggtcttgtgagttgtgcagggtgaagaccgcttccctgagacaggggcagtggtgctgatggaatgtgggggaggcccacatttgagcaaagctgccctgcccttgtcccctggcctggcttcctggtaaggagtttcagccgcctccgcaggaacccccaaagtgcagattccggagcagacacatccgggcggagagactcagcagacaagtgctgcagttgcacggtgggacccggggcctcgtgcgttttttgctgtgggtggggtgggtgggttggtttatgcctatcaatgcaatttttaatttttgttaatatcaacagcaaaagcctagtgcattgggagatgtgcaacctccctgaaaatcttttctgtttctggagtacttcaggggtggcctctggccccagagcctttgccacagtgctcccaccagcccccacctcatccgtctgtttgcagagcctcatctacaggtccccacgctgccttctttactcactctgcgcttggccgttttgttatttggcttagtctacattgggcggaagtctgtgtgcacagagtgggtgttccttcgagccccttccactcagagggccacacccagcgatgccagtgaaggtggcacagcctctcttcagtttctcctgactgtgatctcactggggtagaattcccctgagagaattccctcactcacggctccctttgccagagtcagttcaatcaggtctgatgtgagcaatttacacacttgtctcagaaagtccctcagggtttgtagaggactgcaggggggcatccgctgcagactcagcctttctctgcagccatcctgcagtgggggtgagcgggcacaggctgagaactgctcttgggtggtggaagcaggtgtcacggtgcaagtctccccctgcacccctcccccagcttgagccgtgtcacccccctctccctccagcatgggcctgtgtctcaggctctctggaaggtggccctgccccggaccctcttgcaggtgtcctggtttgacttggaactagatggccatctttccaggctttggtggcccaagagcagtctgggtggatggaagtggctgtcccctcctctccagcccctgcccacccactggtggaggtgctaactagcagggacgtggcataggatgggagctgggcgtgaggtgcttggggtccattctttgtccctcagcttctcagagtccggccagcccttgtgttcccgtgccccacactttcctcctccccactgcagtgagtcaatagtccagggtggggcctggcctccctgccctgattggggactcaggaggtgaggcctggggggcttcctgccccctccttgcccacctgcctgcccccgggcagcacgggagggagagcagggtgagcacgcttgttggtttcagatgcactttctgcttgcattgccgtatctgtgcgttccttcatcctggtcctggctttatggaacaccatgtttttagcatgtttttaaataaaaacggataaagtgtcaaaagcacagca

SEQ ID NO: 339 - DNA, 4150 bp, Homo sapiens
tggtaattgtgacactgtggagctgtccttctttgatgtctcagtcactcagtaagccatgtaatttaaattgaccctctgagtgaccaagttgctctgaaaattttccaagtacatgttacaatgagaatgagagaaggaggagggaaaggcggggacatcatgaaggtagaagaggaggaggtttagaatcaagcacaaagagggctcaaaattacgtggaaattggggctggtcagtcagttagccaggggactaatgactttatgcctgctactctgcagtctaccatcattagggacatcttaaacatagaaaggaaggaacacccaatttcacttcaggcacccagccacaggaactttcctaaggttgagcctttgcgttgaaagtgagaccgttatctaaggattcctctccacaccctgattcctgaggagtgttcaaagactcagaaacaatgacaggcctgctgctgagctttgctgtctgcagtaaatgaacgttcagcccttgccctcctgacctgcttgtctttgtttctacagaacagtgctcggcatggcagggattccagggctcctcttccttctcttctttctgctctgtgctgttgggcaagtgagcccttacagtgccccctggaaacccacttggcctgcataccgcctccctgtcgtcttgccccagtctaccctcaatttagccaagccagactttggagccgaagccaaattagaagtatcttcttcatgtggaccccagtgtcataagggaactccactgcccacttacgaagaggccaagcaatatctgtcttatgaaacgctctatgccaatggcagccgcacagagacgcaggtgggcatctacatcctcagcagtagtggagatggggcccaacaccgagactcagggtcttcaggaaagtctcgaaggaagcggcagatttatggctatgacagcaggttcagcatttttgggaaggacttcctgctcaactaccctttctcaacatcagtgaagttatccacgggctgcaccggcaccctggtggcagagaagcatgtcctcacagctgcccactgcatacacgatggaaaaacctatgtgaaaggaacccagaagcttcgagtgggcttcctaaagcccaagtttaaagatggtggtcgaggggccaacgactccacttcagccatgcccgagcagatgaaatttcagtggatccgggtgaaacgcacccatgtgcccaagggttggatcaagggcaatgccaatgacatcggcatggattatgattatgccctcctggaactcaaaaagccccacaagagaaaatttatgaagattggggtgagccctcctgctaagcagctgccagggggcagaattcacttctctggttatgacaatgaccgaccaggcaatttggtgtatcgcttctgtgacgtcaaagacgagacctatgacttgctctaccagcaatgcgatgcccagccaggggccagcgggtctggggtctatgtgaggatgtggaagagacagcagcagaagtgggagcgaaaaattattggcattttttcaggcaccagtgggtggacatgaatggttccccacaggatttcaacgtggctgtcagaatcactcctctcaaatatgcccagatttgctattggattaaaggaaactacctggattgtagggaggggtgacacagtgttccctcctggcagcaattaagggtcttcatgttcttattttaggagaggccaaattgttttttgtcattggcgtgcacacgtgtgtgtgtgtgtgtgtgtgtgtgtaaggtgtcttataatcttatacctatttcttacaagtgcaagatgactggctttactatttgaaaagtggtgtgtgtatcatatcatatatcatttaagcagtttgaaggcatacttttgcatagaaataaaaaaaatactgatttggggcaatgaggaatatttgacaattaagttaatcttcacgtttttgcaaactttgatttttatttcatctgaacttgtttcaaagatttatattaaatatttggcatacaagagatatgaattcttatatgtgtgcatgtgtgttttcttctgagattcatcttggtggtgggtttttttgtttttttaattcagtgcctgatctttaatgcttccataaggcagtgttcccatttaggaactttgacagcatttgttaggcagaatattttggatttggaggcatttgcatggtagtctttgaacagtaaaatgatgtgttgactatactgatacacatattaaactataccttatagtaaaccagtatcccaagctgcttttagttccaaaaatagtttcttttccaaaggttgttgctctactttgtaggaagtctttgcatatggccctcccaactttaaagtcataccagagtggccaagagtgtttatcccaacccttccatttaacaggatttcactcacatttctggaactagctatttttcagaagacaataatcagggcttaattagaacaggctgtatttcctcccagcaaacagttgtggccacactaaaaacaatcatagcattttacccctggattatagcacatctcatgttttatcatttggatggagtaatttaaaatgaattaaattccagagaacaatggaagcattgcctggcagatgtcacaacagaataaccacttgtttggagcctggcacagtcctccagcctgatcaaaaattattctgcatagttttcagtgtgctttctgggagctatgtacttcttcaatttggaaacttttctctctcatttatagtgaaaatacttggaagttactttaagaaaaccagtgtggcctttttccctctagctttaaaagggccgcttttgctggaatgctctaggttatagataaacaattaggtataatagcaaaaatgaaaattggaagaatgcaaaatggatcagaatcatgccttccaataaaggcctttacacatgttttatcaatatgattatcaaatcacagcatatacagaaaagacttggacttattgtatgtttttattttatggctctcggcctaagcacttctttctaaatgtatcggagaaaaaatcaaatggactacaagcacgtgtttgctgtgcttgcaccccaggtaaacctgcattgtagcaatttgtaaggatattcagatggagcactgtcacttagacattctctgggggattttctgcttgtctttcttgagctttttggaaggataattctgataaggcactcaagaaacgtacaaccacagtgctttcttcaaatcatatgagaaatactatgcatagcaaggagatgcagagccgccaggaaaattctgagttccagcacaattttctttggaatctaacaggaatctagcctgaggaagaagggaggtctccatttctatgtctggtatttgggggttttgtttgtttttgctttagcttggtgaaaaaaagttcactgaacaccaagaccagaatggatttttttaaaaaaatagatgttccttttgtgaagcaccttgattccttgattttgattttttgcaaagttagacaatggcacaaagtcaaaatgaaatcaatgtttagttcacaagtagatgtaatttactaaagaatgatacacccatatgctatatacagcttaactcacagaactgtaaaagaaaattataaaataattcaacatgtccatctttttagtgataataaaagaaagcatggtattaaactatcatagaagtagacagaaaaagaaaaaaggactcatggcattattaatataattagtgctttacatgtgttagttatacatattagaagcatatttgcctagtaaggctagtagaaccacatttcccaaagtgtgctccttaaacactcatgccttatgattttctaccaaaagtaaaaagggttgtattaagtcagaggaagatgcctctccattttccctctctttatcagaggttcacatgcctgtctgcacattaaaagctctgggaagacctgttgtaaagggacaagttgaggttgtaaaatctgcatttaaataaacatctttgatcacaaaa

SEQ ID NO: 340 - DNA, 1238 bp, Homo sapiens
ttaagtggtctgcccttccactgaaagtgtagctttttgacagtctcagccatataaacaggatctcagtttcatccttccatccatccattagaggcacaaggtctcatctcttttccttttgggcattaaaaccaaagttcatacattattgagacaggccgactctgctaaggcagcctgtttggcctttaagttttattgcttattttttgagtatgtatttatttttttgattattattattttttttttgagctttaagccttcaagtttcctttttattcttgacccctagacatttcctttgcttgtggactcgggtatttgtttttaggtaatattttttttccctatgacacagccctcaggagatcctgagaacatgtgccctcatttttaggtaattttaattaggaagggttttaggttgtctgatctgccttgttgctagaaacagaaattctcctattgattgatttttcaaaccacttcttagtggcctctacaactactccagtcaggtcaagaatggctctcacattgccaagtcagtgggtatttttagtcttcatcttagatgacctttatgcacatttgtctttgtctaggaacttctgttggaaacatcttctattttaatgttattttaaatttttttgcttttgtaacattatgcttagcatgtgtgtccaactctttgacaatttctttttagttttctggtggcttccctttatccaaatttagtattgaaattcctcgagccgctgcttttctcactccataattctggccagaatttggtacttaaaatattttgtctaaaatattacaatagctacttaagtcatctccctgactccactctgttgtctttcagggcgtcgtccacactgtagccaaagtgatcttataaaaacataattctaatcatggcactcttctgcttaaaaatgttttaatggctttccgttaggttaaaatttaaaagtcctttgtagcctgtgagactctacatgagttgactccctagcttcatctttgagcatcttatttctttacttattataccatcagttagagttgattgttatataatccacagaagtgaattctgtctgatttaagcaaaaaaaaaaaaaaaaaaaaaaagagggagaatttattaggtgtgtatagttacagttaatttagggaattaaaagacagaaataggccgggcatggtggctcatg

SEQ ID NO: 341 - DNA, 1112 bp, Homo sapiens
ttaagtggtctgcccttccactgaaagtgtagctttttgacagtctcagccatataaacaggatctcagtttcatccttccatccatccattagaggcacaaggtctcatctcttttccttttgggcattaaaaccaaagttcatacattattgagacaggccgactctgctaaggcagcctgtttggcctttaagttttattgcttattttttgagtatgtatttatttttttgattattattattttttttttgagctttaagccttcaagtttcctttttattcttgacccctagacatttcctttgcttgtggactcgggtatttgtttttaggtaatattttttttccctatgacacagccctcaggagatcctgagaacatgtgccctcatttttaggtaattttaattaggaagggttttaggttgtctgatctgccttgttgctagaaacagaaattctcctattgattgatttttcaaaccacttcttagtggcctctacaactactccagtcaggtcaagaatggctctcacattgccaagtcagtgggtatttttagtcttcatcttagatgacctttatgcacatttgtctttgtctaggaacttctgttggaaacatcttctattttaatgttattttaaatttttttgcttttgtaacattatgcttagcatgtgtgtccaactctttgacaatttctttttagttttctggtggcttccctttatccaaatttagtattgaaattcctcgagccgctgcttttctcactccataattctggccagaatttggtacttaaaatattttgtctaaaatattacaatagctacttaagtcatctccctgactccactctgttgtctttcagggcgtcgtccacactgtagccaaagtgatcttataaaaacataattctaatcatggcactcttctgcttaaaaatgttttaatggctttccgttaggttaaaatttaaaagtcctttgtagcctgtgagactctacatgagttgactccctagcttcatctttgagcatcttatttctttacttattataccatcagttagagttgattgttatataatccacagaagt

SEQ ID NO: 342 - DNA, 294 bp, Homo sapiens
atcagcactgaatacttatgtatttcttacaaacaaggacattctcctacaatatcacagtatagctattaagaacagaaaattaacactgctatattactaccatctagttttcaaatgccattcaagttttggcagttgtcaatgtttttggagatcacagcgtagttgttttggattttatttttcattactaaattcagattatgttttggggggcaggaattttatagaaattatctttgcagtgcatattatcaataacacataatcaggctttcccaatgtaaaggt

SEQ ID NO: 343 - DNA, 140 bp, Homo sapiens
gtctctactaaaaatacaaaaattagccaggcatggtggaaggcgcctgtaatcccaactactcaggaggccgaggcaggagaatcgcttgaacctgggaggtggtggttgcagtgagctgagattgtgccattgcactc

SEQ ID NO: 344 - DNA, 294 bp, Homo sapiens; identical to SEQ ID NO: 342

SEQ ID NO: 345 - DNA, 1052 bp, Homo sapiens
ggacattgcccccccgcctgctgaggctgttccttcctgctgcacttgagcagcctcatcttccttcatctcctctcatgttcacttctctttgcctggaccaatggggaaaaaagtgcacagaatgagattatgtgactacagcaattctgagttagctttgattgctctgcagtaaaattaagggaccatatctttctcatgcacatgatatatagtttcaaatatagatctgtacatacgtgatgatgaaaagttcttcaggatgaggatgtatcagagagtgtgaattgaggccagtcttctgtttcctcccaaactcttaacagattgcatatcttcatgcaaatcttttcatgtattccttgtatactacctatagaaaggtgggacttgggagggtcacttacaactcctgtgatcttattttctcctccaggggctccttgaatagagttttcccccattttactggccaaggctgcagttagagctgtggtttgtcctgcaggggatatttgtcagtgtctggagaaatttaggttaacgcgactggagaagtgctattggcatctagtgagtggaggccagggatgctgctaaacaccccgcggtacacagcagaccaaagaatgatctagccccagataccagtagtgctgaggttggaaaactcttaagttagtaaatatacaactgataggaaaaacatgaagtttcaataattaaaaagctttgcacgaaagtttattacagggctgggcatggtggcttaggcctgtaaatcccagcactttggggggccgaggtgagaggatcacttgagcttaggaatttgagacctgtgttggcaacatagtgagaccccatctctaatatatatatatctgggcatggtgtctcctgcctgtagtcccagctacttgggagggttgaagtgggagaatggcttgagtccaggaggttgaggctgcagtgagccatgattgcatcactgtactccagcctgggcgacagagcaagaccctgtctccaaaaaaaaaaaaaaaaaa

SEQ ID NO: 346 - DNA, 431 bp, Homo sapiens
ctgtgaattgacacatatagcttcctctactgtaaaggttgatgtggctaatgagaaatatttccacatcttctcctttatttcaaggagataggctgtggaagtcagacgtctctaagccccaagctgttttatgtagcctgttgttagtatgtggaagctgaaattcttacagagttactctagaattgaaaaatctatctggaagtttggggagtactcatagtgcactaattattacaaattttcattatcttacttggattaaaaattattagagagccatttgtcatactgcttagattacaaacaattatagagttctagagtgcattataagctcataggaaatggaactttgtatttggtggcaaacctttattctttaggtagatatttgaggtggctcagcagatttatatgttgcggta

SEQ ID NO: 347 - DNA, 18367 bp, Homo sapiens
cttatttgcaggtggactggcagaggaagtggacgacaaagttcttcatgctgcgttcattccttttggagacatcacagatattcagattcctctggattatgaaacaggtgagttagtgtctctcacgttcagaatcctcttactaggaaaataccttaaaaaattaaagtcacatcacaattctaaatatgcattctaaatatggttagtatacactacaggtaagttcaggaaggtgtctggtgacagtgatctcgatggagaaggaatgttctgaggccatgtggttgtgaactctgaatactttccagagtcttcagctgttgggttgagataagacagatttttcaatagaccagtagggagataggtttgaactacattgagatttgaatgttgttttaatctacctgatgggtaccccatcccacctgcaccttcttgcagctgtgctattaaatgaggcagcgggaaagcctagccccataatgggggtgggtgagggcgggggttcttggcctctgcacccctgggtgggtttcccatcgattggtatcacaaccacagttcagttttctgtttacctttgttgtcatttttaagattatagttttaggcctagttttatcatcaaccttgcatatgattgttagcaaagtctttaaactctctgggcctgggaaatctttatttgcaaaatgataaggttatgttggctttctaagggccttctagtctctgagttctatgataaacattattgtgcttggtctttctagttagttcagcattttcctgaagataaagactgagcatctttatcaggttttaggattcatgctttatgcacagttgatgcgcaaaatatatatttagatagataattgataggtcaaatgactttatttttctaattgctttgcatgcaatggttaaggttttaagtttggctttcgtagaataattgaatacttatcaattaaaaatacagtttactattcagctatgtccattaaaaaaacaaagtttattattgcttaaaatattgtataagaagaatcaagaatgagattccttcttcctaaatagtgattggatagaacttctggtgtttggatacgacatgtaactgacttcactttgtgaccatcctgtttcttcccactaccccacatagtaattacttgtttttgtttttccattttgtagaaaagcaccgaggatttgcttttgttgaatttgagttggcagaggtgagagtctgtgttactagtgtctagtccttggtttgtgatgttgttactgattacaaaggaagcttttcaccatttggttaggtttttgggccttaggctgatgcttccagagagatcagaagtaagtgctgttctaaggaaagcgtctctcacataatcagactggactgtgaataacatgtcagacctgccaggccctcccattcttgccctgcagaggagctagctcatgcacccctgttcattgagcattcttgcctggaagtagtgattatttcttgtgccttcaactagatggcaaattgttgcaccaccagctctaaaatcagccaggaagtgctctttgttagaaacacacaaaacctaggcaagaaatacagaggtggcatttttctggatttttgctactgagcatgtgtttagacaccataagaagcatttggctgcaagcctaaacttgtacctttgtctttccttggcaggatgctgcagcagctatcgacaacatggtatggctgggaatcttaattctaactaaagttgctttttggtggtacagaggctccttattcatatatcagtgttctggacttccaaagttacaaggttgcatggggaggtaaaaattctcacatgaaaatattcactgtgaattgatcacttataaaattagttcttactcagactccttcgccatttcagaataatgtaagtcctcatcatccttgttgaccagtctctcactggctctcccatgtttaggataatttgcagacacagtgcaaattgattgcacggtgtaactgcatattttgcaaaatagcaggatttcatgaagtgttagaccaatttacaattgagaagagaaatttaattatggcaggtgcaaatcactgatacaaatgatttggatattctggaaaggtccttgggaaaaatgatgatgctctttagtatttgtgccttccttgagatccttttagttttcatgtctgataagaagtgcaaagataccatactgttgatagaattttgttggaaaaataatacttcagtgcctgttacttttctttctttctttttttttttttttttttttttaacaatcttgaactcatgagttcaagacttctcagcttctcaagtagctggaattacaggctcaagccaacagggctacctgggctacctgttacatttctttctaccaagttacatttctttctaccgattagtgcatagttagtcctgaatattaatggtaagaaacttgtttttattatttttagtttcatcacagtaatttcccagtcagccttttaaaatttttcaattttaccacgaaatcttcatcaccacttcaagtggagtcaccttaaatgacctttcctggtaccgattatctttggataatgagatgttgttttatttgttgttctgttatccattcaccaaacatattcatcagctgtcagagatcatttttctttcatttcaaagcttatcttgacttttgaaggtgaactcaaatactgggaaactgcatttatttttgtaattttggagtgttctgaacccagagttacttttggtaatacaggtctttgtgtgctgctatgaaagaaaggggtgtgagttccctgaaacccacaggtggctttggggtggctgcatagcttactggtagaggcccagggattaagggaggacaaatcatgagtgtgtctcagaagtatatggaaagctggctggccctcttttaacctaagagagtttaagcagctggattttcaatcttttcagaatgaatctgagctttttggacgtacaattcgtgtcaatttggccaaaccaatgagaattaaggaaggctcttccaggccaggtgagtaggagcaacttccagattccctgtgatgttctgcagtttggccttagttgcattttttgtctctatttacttggaagtagatgctaaatgctgcttcctggtagataggagtagatgatggttcacattgggaagggcatgcaccacctttttagagaaacaagtgagtttgagcttctcagcaaagccaaagtgattgtttctgttatgagagaaattcctgcctgagctcatctttcccagttttcttgatattccattcctggggtctccatcaagggctgaaatcagcaaaggctacacctttgctttcggcatagctattttccttagccctactgagagctggacttcagggcctacattctggatgggaactttccttacccctgggagttctcagtggggaattgtctggcatacaggccacatagcatcttccactttgctgaccaaagcagctacttttcagttcaagctgacagcttgaatgaacatttgtttgattctttcctttcagtttggtcagatgatgactggttgaagaagttttctgggaagacgcttgaagagaataaagaggaagaagggtcagagcctcccaaagcagagacccaggaggtgagaatgaagctcctgcttccagagcacaggccggcgctgtccacaggagacttttttttttaagttttaatggaaatttgccaatatgtatatcaaagtggagggaatgaataatgaattcttagtactttggtaaagtcaatattgagttcttagtactttggtaaagtcaatatcgagtgaattcaagggcgaaactttgggtctcttgtccatgttgtgttctatgtgatgagtgtctcagctctgctcaggtatggatttgtgattatcaactgacagggaggaagctgaggtgcccctcttcacccctcctgatcagtccccctccttcactgaagagtttgccacaagggtcgtggtcttcctattcctgtgctaatggaggggagacagaatagggtagtgtcccttccttcaacctgtacatgggttcagggttctccagtcctacgggaacctgctggggcacttccccctgattctcagcatagtctctgacagttgcttcctgggcgtcccctcctctgagtactttgtgaatgttgtcattcttctgtatttctttcttggctcatggtttctctctcttctctcagctgaaacagtagcagtctatctctagttttatgcagcctctgttatgctgttgatcttcatggtctctttctagtcctgagcttcagatatttctgcctgcaagtctcatgggcagcttaagtttgcctaaaatggattctcccgcttctctaatcctgtcttcctgtgttctcaatcttggctaatttgccaccattcatccacacattgacccacgccagaaatttgaatgcaaatcagaactcataaagtggccatcacagtcagtggagtccccctggatcatcctgtatcctctgcttagtcttacctacttggagcacaatgcaaggcccaacatcttccactgtcttctgagcacttaggcctgagcaagagggctgcccccttgcttccatgtagttagccagtgtatatgcagggccaggcacagagggacgaggtggtacatggatgggtctgcctaactagaggacagtgggtgggctggaactggcatttgaagatactgagagttgtggatcatggaccagaaaagtgctgttctgtgactgtgaagcaagaggaggaagcagatgcatctgagggcaagcatgatgagataacacccccgtgtgtgaggctcaggttagccagtgctgagacctcctgtcgctgggcatccagctgggtgctacggccatggctcctgcctcctgcagccctatcagggcccaaggccttccccgtcagcacttgctccagcctacgcactggagttgtgttctgggtgggtgtgtagaatactcgcactcctacttagggcgtcagggagctctctctaactagcaatttcttctgcacctagggagagcccattgctaaaaaggcccgctcaaatcctcaggtgtacatggacatcaagattgggaacaagccggctggccgcatccagatgctcctgcgttctgatgtcgtgcccatgacagcaggtgagcaggacgctgtggtcagaacggcgggacgctggtggctgagcagtgagcctttcccaggttcttactgcttcacttcttgtgtccttgatattgcttctgacctaagttgatttgaggcatctcagatcctgggatctagtaacagataagtcagagcaggtgtttttgaagctttataagtgctggcttactgttttttaatcgttttttaaaaatacaagtaaataatgtattcttttttttaaagaatagcatatacatatattccaataatatttaagacaataaattgaaaattcattttcccctctctacatccagtcctcaattctagaagtaactagtgcttttattgagtattctttgtaatttattaaatattgacttctattctctttttaatctaaattttattatctagacatataaagagtcaattcagtttcacaaagcttgttttgaaaaaacagtcgtcccctggtgctgtccctgtgccctgctgccaacaccatttgctgctcctcagaggagcggatttcaactcttaggtgttttggtttttatttccatgttgataacagttttatatttctacttcctgttttccattttaaacattatcttctgattttctacttcagagaacaaagaattagttttttaaaatccccttccctgccccctcatcttccctgtataggtaccataattttggttaggtcctaagttattttaacaatgtaagcatcatgtgataacctcctttcatgcacagcattttgttttgcctggaattgataattgccttgtttttgcatagttttctgtgtaatcattcctgattttctcccagaccatcctgctgggggttttgcatccaggtgtctgcatcttgttaaggggagatgagggcaaggctgaattcctcaacattcagtatataaactttcacataatctccatttgtcattatggtacctcagccctcactatgcgtaggatgtcctagtccagagaccctctgctttaacctaccaaagactagacccccagctggctaccaggttggggaggggtggcccccagctgcagagtcagggaaaggatcccaaagattaaccactttcttaaatgggctttcagccaaacttactgtctccaggattacctgcaccctttcctctgagcttttggagtgcaaattgagttgcttcttggcttttaccagcttaagattcagctttctcgggtctgctatatcatttaggactcatctattttgttttctaacttcagaaattttgttgctgttgtctcttcctccctgctttttaagtttattttttggctattttagccactttaaagtgtttgttagcagtaattactctgttcgaaatttttgaatcatcctaaacaaaaccacttattaaaggtacctattaaataataactccccattttctcctccccttagcttctgataacctctaatctttgtgtctatgaattggcctatcctagatttttcatgtaagtggaatcatacaatagctgtccttttccacgccttgttgattttgcatagcataatgctttcaaggttcatccttgtaccatgtatcagtgcctcattcctttttgtggctgaataatattccgttgtatttggataaatatcttgttcattcatttgttgatgggcacttgcacattgttttcaccttttgactattgtaaatgcctgtgtgaatatccacatgtaagtatatgtttaaattcctgttttcaattcttttggatatatatgcctaggaatggaaatgcttagtcatatggtaactctgtatttaactttttgaggaaatgccaaactattttccacagtggctggaccattttacatttctaccagcaatgtatgagtgtttcagtttttccacatcttctctttttttttttttttttttttttttgagacagagtctcgcactgttgcccgggctggagtacagtggcgtgatattggctcactgcaacctccgcctcccaggttcaagtgattcttgtgcctcagcctcccgagtagctgggattacaggcgtctgccaccatgcccagccaattttttgtatttttagtagagacgaggtttcaccatgttggttggccaggctggtctcaaactcctgacctcatgattcgcctgcctcggcctcccatagtgctgggattacaggcgtgagccaccatgcctggcccacatcttctcttaacaggtgtgacatggcatctcattgtggtttttatttttattccctactgactaatgatgttgaacatcttttcatgtgcttgttgaccatttgtatatcttctttggagaaacatcttttcaaatctttggcttatttattaactggattgtttgttttgttttttttaagagacagggtcttgctctgactcccaggctggagtgcagtggtgagaacatggcttactgtagctttgaacccttgacctccagtgatcctcctgccttgacctcccaaagcactgggattacaccgtgcctggccattttgttgttgaattataggagttcattatatattctggatattaaacccatgttaaatatgatttgcaaataagcattctcctgttctgtgggttgctttgccctctattggtacggttctttgatgcacgtcttaaattttgataaaatctaattatttttttctttcacctctgcttttggtgtgacatttaagaaaccatcaccaaatccagagtcatgaagatttgcccctatgttttcttctaagatcctttggtttttcttttaaaaaatcagtttcctaccaatttagtgtggttttaaaagggaacagagctcgaacatgtatattcaatcccccttcaacagaatctcctatagtcctggccaggtgtggtggtttacacctgtaatcccagcactttgggaggccaaggtgggcggatcatctgaggtaggagttctagaccagcttggccaacatagtgaaaccccatctctactaaaaatacaaaattagccaggtgtatggtacatgcctgtagtcccagctactcaagaggctgaggcaggggaatgacttgaacccaagaggtggaagttgcagtgaactgagattgtgccattgcactgcagcatgggcaacaagagtgaaactccgtctcaaggaaaaagaatcccttatagtccttacaaggttagtatcacaaaggtttataatgagtatctcttattttaaaacaaaaatatgaacactaaaccaaagttttttcgaggttttttattttgtcctattttttaaccccagcgctttttcctttctcaattccagagaatttccgctgcctgtgcactcatgaaaagggctttggctttaagggaagcagcttccaccgcatcatcccccagttcatgtgccagggcggtgatttcacaaaccacaatggcactgggggcaagtccatctatgggaagaagttcgatgatgaaaactttatcctcaagcatacgggaccaggtaggagccagttggcatgtggtgacgagggaggctgggcaagggtgggatggccaggcaggatggaaggacaggttgtagttctggctggcggacactaagagtctggaggagacccagccaccagacataggagaaccatgcagccttgctagggtggagttggcttgttgacattcaggtactgttcatcccccaaccgtgtccacaattcctattagccccgcttggattctgtggtctgctgttgcaggctcttatgctctcaaccccactgctctccctgccctcaccatcagatttactcagtaaaatctcggtggttagtcccccagcaactagagaaaaaacacagaattgtactgaacaatcccacttgaaatttataactatagttcttaaggggacccttgccaacctgaccagatttccctacttgatgctcagtcccaaccggagatgatgtgtccatgcccgtcttcacttctgaagccctcatatcatcaccttcccacctcatctaatgcttcacctcctgcatctctccactcgtgcatgctctttcttccaattacaggggatgagctgtctctcctaggccagcctctccacctgtggactggatcctgtccctctcctctacttaggaacatggcttctaaagttgtccccttcttgtaatccatttcccctgctctgctagatcagtccattagcatgaaagcatgcagttatcaacctttaaaaaaaatcttcatccggttgccgggtgcagtggcttagtcctgtaatcccagcattttgggaggcagaggcaggcggatcacctgaggtcaggagttggaggccagcctaactaacatggagaaaccccatctctactaaaaatataaaattagccgggcgtggtggcgcgtgcctgtaatcctagctgctcggaaggctgaggcaggagaatcacttgaacctgggaggcggaggttgtgatgagccaagatcgcaccattgcactccagcctgggcaacaagagcgaaactccgtctcggaaaaaaaaaaacaaacttcatccttgtactcttgttccctctccagctatcacccatgcccctggtcccccatcttttttcaagaagtaaaagcataacttcttgaaaacatggtacagacttgctgccttcgcgttttctctaatcccttctaggcagacttctagtcccatctcgccattgaaaccactcttgccaaaaatacgagtagccagttcttggcgatcatcttatcccacctcccagatgttatcccacctcccaggagcatttcatactacaggttgagtgtccctttcctgaaatgcttgggaccagaagtattttgtattttggaatatttgcattatacttaccagttgagcatcccaaatctgaatatctcaaatctgaaatgctcgagtgagcagttcctttgagtatcatatcagtgctcgtgaagtttcagattttggggcattttggattttggattttcacatttgggatgctcagcctgtactaactctgttctccttgactccttcttcacttggctggcaggactcctgcctcttcttgtctccttttacctagatggctgctttttctgtctttgctgtctccttcttttcctgacccttaaacactgaagtggctcagagcccattctttggttctccagaagcctgttaccctgtgctccgtttttctaactggtggtttgtagggcccctctttactatactgaactgacatgtgtaggtgatatagcccactgacccacatcgttattttaaaaatcagtattcatctgtaactataatagggaagaacatcagaggaaataaacgaatttgtataatactcgaatatgtttccagatgtacatgcttaagcacagctgtgtcagaacacaaagtgaattattcaggcgtctgcccctgtactcaaacgcagcagttagaaatgcagacgggagtgtcaactggataccactaggagtgatgctattggtgatacggctttgtgaaatggtagataaagttgattagagtccaaagtaaagaataatctgtttatttacatagtagttacattcctagaagattccatggaaaatcaaaagcactccaaaactttgggcttatatgtataatggaattatgttttaggtgcagataactgtaaacacattttttacctataccaatatctggcaggatatttgttgttttgttgttgtttggtttttgtttttttgagacagggtctctttctgttgctcaggctggagtgcagtggtgcaagacggctcactgcagcctcaacctctccagctcaagcagtcctgcctcagcctcccaaatagctgggattataggtgcacgccatccataatgccaggctaatttttaagttttttgtagagacagggtttcattatattgctcaggctagtctggaactcttagcttcaagtgatcctcccacttcagcctcccagagtgctgggattacaagcattagccactgcgcccagcctctagcaggatgtttgtaagggccaagaggatatgagacaattcattgtgccagacattgcagaacatctagcattccaggcccccacctgctaaatgccagtagcacccccacaatatttcagacagtcaaaaacactttcaggccaggcacggcggctcatgcctgtaatcccaacactttgggagtctgaagtggcagcccaaagccagaggatcacgtgagttcaggagttcgagaccagcctgggcaacatagtgagaccctatatctactgaaaaaagaataaaaaaattatccaggtgtggtggtgcacgcctgtagtctcagccgcttgggagttgaggtgagaggattgcttgtgccccagagattgaggctacagtgagctgtgatgcactcctgtactcagcctgggtgacagagtgatccccatctcaaaaaaagtaaattcagatttccaaaggtttcctagggacaggacaccaaccccactgagaagcagtgccctaagcagtcacacccggtcccagggctttcagcggtatctctgagttaagtttgtgcagactggcatctgcatgctgatggctccctgagctccagactcctgtccaactgcctgcctgttgtcttcactggatatcccacgagcatctcacactttacatgtctaaaacagctcttggccttctcccctaaactcttcctcctcctcttccctgtttcaataaatgactccaccatccacttagccgcttgatcagaaacttaggagtcattgtggacacacacacacatacatacatgtacacatacacacacagacacacacatatacatgtacattctcttacgtgacaaatgtccatgttaccaggcctcactgtgtcatagctgtcattttgaatggctcttttccactgattgtgagctccaccagagcttggactatgttctgctcatcagtgttcccagggcttaacagggacctggttgtcaagtagacacttaattgttaaataaatgaattaatgaaagaacagaccagtataaagtgattgaaacacctcacttaccatttcactgactattaactgaatccaagataaggtggccgcatttgcatgtgatctgtgcatccccgagtctgagcctgactggctgaagggctgtcaacagcctgcacagacgtcctttaagggctggtagccagggttcggggagctgatggttgttctctccctcaggtctactatccatggccaactctggcccaaacaccaatggctctcagttcttcctgacatgtgacaagacagactggctggatggcaagcatgtggtgtttggagaggtcaccgaaggcctagatgtcttgcggcaaattgaggtatgtggccaggaatgggcctcctccttacccaggccctaggagcacagccctgtgtgagggctggagagtctctgtggcctgagagagatggccaggggctgtgtccagcgggaggggctgctgctgcccaggttccggggtggaagtgggcaaatgggcaggcaggggttggtatccctaaaccactgttagtctccggccttactccctcacttctattctgccacaaaggcccagggcagcaaggacgggaagccaaagcagaaggtgatcatcgccgactgtggggagtacgtgtgaggcggcactctctctgcttccccctccgctcttgaccctgcatatccaggaaggaactgccagcctcagaggaggcagcaccgagggtgcctgtttgaagcaagcagcatttgggatatgtgcccttcctcagggtctgcttggagcagctcctctgcaggcacagcctggactattcccaggcacagctgtgggcccaggagccagctcaggtgctcccctccaccatgggcaggctgtgcaaaaagccactggcttttctcagcatttgctgctgggcctctcctgggactaccagtgtggctcttacgtgttttctttgctaaaataaaccctagttcttatattgctcttcctgctagttcttgggagttgtcagagattgtgtctgtggctaagctggacctctgaggcaggctggtgagtggggagagcagagcatctttttcacagctttcatttcctcccttgggccgatccccttagatgtcaggtgatgtatcttcacaccaggcatcgatgtcagggcaacggaaattaaagactggaaagctccggtcttctgctgcctctgctcctaaacccagctgccggccttacagccagcaagtgtactctcagtggttcatttgtttatttgttcactttcaccctacagattttaaaaaatgaaatttttataactcaaagtgccttctctgtgccaagtactatgcctatttgtcaggagacaggaagccaacaaactacatgtgcctaatccagcccactgcctgtttttatgaatcaggttttattggaacacagccacgtccatttatttacatattgtccatggtggtttcttactgcagtggcagaggtgcgtaaggggctatagacacaatacaggctatggtccctgtattagggttttctagagaagcagaaccaatagggtgtgtatatatgtagaaagagatttattttaaggaactggctcaagcagtggtaggagctggcaagtctgcaatctgcacaacagaccagcaggctggagactcaggaaaaaaactgatgttgcagttcagctctgaggcagtttggaagcagaattcttcctccagtgatctcagtcttttttctcttaagaatttcaactgattggatgaggcctacccacattatggagggtaatctgctttactctctactgacttaaatattaatccatctaaaaaataggccaggcatggtggctcatgcctataattccaccactattgggaggctgaggcaggaggatcacttgagcccaggagttcaagaccagcctgggcaatgtagagacccccatctctagggggagaaaaaaaagccaggtatggtagtgcacacctatagtcccagctactcagaaggctgaggtgggaggatcgcttgaacctgggaggttgaggctgcagtcagccatggtcatgccactgtactccagcctgggtgacaagagggagaccctgtcttgaaaaaaagaaaccatcatcacagcaacatctagactagtgtttgactaaaaactggataccatggcctagccaaattgacacacaaaatagaccatcacagtcccaaggcctaaaatacttactatctgagcctttacaaaacaggattgccagccactgaagagaacaaatggtcccaccccctgctgagctcacagtctggctctcctgtgtgcagccacttcttggagctggcttctctccactccccctccagatgctggtcagccaggcggttataaagaatctcatctgctgaaggcttttagcagggactgagtcctgtagctgttggacacctcctgtgggttgggtcactcagaccattcagaatccactgagctgagcttttgcatcttggattgagatctggatgagccaggaggcaggagaggctaggtggtcctcatgaccctaggatagctcttgctgagggatggtggcattctgccctacctctggctcccatgtgccgactggactttgtgagctccagctgctacagttgactgagttcaggctccatgtagctgggatatactacatggttacccctcacccctatggagcttccaaaagagaccctccctcaaagcacagccccttctctgagtgcaaataatggccatcagaggtcagtcacaggtgttaggcaggcatctatgaagctggggatgatagcactgacttcagtgcttggacgagaaccaggagagagtgtgtagaaaaagcacagccagcctcccataaaaggacagactcctgtgacaaccttgtcactctgttcctccctgatactctggggaggtggaggccagtgggcagttctgaaagctcagcaggtttggagccattgggtgtggactcctctcccagtgttcctcctgggtgttcacagatgttattgaatgcacactggaaccctgcacaggtaaactgaggctttattggcgtgactgccaaaggtcacacagggtggtttggcagagctgggattagaagcccagcctgtctctcttcagtagtaatggagtcctgggaggtttactaggctttagcctcaatctgtggcggcagggtccacagccctggggagtgacacagtcatggtccccatgattggccaggacctgtgtggagagacacaggagacaagaccctgctcttccaggccagaagggaggggagccccagagctgggcagtggcatgccccacagcctggccacctgcttcggctacgcaccatgcagcagctgcacctggctgcctcgggaaaactctgacctctctgggaagtggagccagtggctctgtgggcgtcctttcctgcagcctggagagcaaagcggctttccctgggactgtgtggctcctgtcccaactggcctccccattccacattcccattgctggaccagcaccaggactgggcacagggcttccttttgctgattcatttcccccctaactcattcagagttgagccccatctgagtccccacatgctggccctgaaacggttacaaaggctgaaaccagggatggcaggcccaggatcagtgctgtggctgttggagtgtcctctccaacagcatgacagccgcctccaggtgctcccagcatctgttgcagtcatggcagcctcacggcaacctctgaagaaggaattatagaaccaactttttattgttgaaaatggagtcttgtagagttcagtgatgggaaactaaagtagaaaaagcacatcacaaagaaacatatatagtacagtgtgatcccaattttgtaaaaatatctgtaatatgtaagcataggtatttgtatatcttaagaaaaaaagcctagaaataaagccacaaaaatattaatagtgtgtttatttgacttgtgggactgtagtgatttgaattgtattttattttttatatatcccactttcctccaaaactgcattatttttttgagaagtgaaagacatttttgaaaaagggggtcaagtgcccatccagggttcctttcaaaaagggggccaagcagttgacctggatgggcagttcccccatgcaaattgccacccaagacacctggtgggtacagacctctctcagcaggacatgggatcccattgtctgggaacacagcaaagtttcacagccgctgccacaagtgacacttgctaggcctttaaaggctataagaatacaagtcccgccctctgagggatgccatgtgtagatggtttaggaaagagcacagctctgaaataaatacatcatcacctgcagaacacattttggtttaatggacagacatagaagtggctcaaaaataagcaaattcatttgtaataataccagcaaatacctattgttaagcatttatatgtcagacatcccaaagatttgtgtacatatttagtctttataatagctttgggaggaaagaaccaatatcatactctacaaaggaagaagcagaaccaggattcaaatctatttggcaccaaaaatctgcctcttgctacactgcctctattcctgtttctttggaccttttccagaacatgttacttccctgcctcagttagaagttagtgactacgaatcccctgctgacttggcctcaaggccagtattgcaccgcaaggaccaagactgctgggcattcctcttttgcctgttgtatgcgtcctctcttcctgtcaactgtcattgatttctcattgctgtcagtagatctgaaacaaccaccaccatcatccttccaaccctcatctggtgcaacgagataaacaggccatgccctgagcaaagaaaagggaaatggtggtatctgtgctgccagcctgggccacccactgcagatgcacatgcttggctcagcaaacggataaggattaaattcatggactttgtgttcattcacaattgtttcattgctcaagggatttttctattttatttcatttggtgactatctggatgataaaagttgctgaaagtctgatggccaactaggtagacaaagccttatgtttttccattgttctgtatgaaccaggaggatcacggctcgtattggttcctgctatgcacagcttgattaatgggtaaggtgtactccatatctacaaaccttcaggtagtttacagacattcttggtgcacccctaactatgccagatcattggctgggcactaaagatacaggtggagtaaaaaattaattgtcaaaataactggctaatttaaaatttacaattgcctagaagaccatctttgatgttaagaaggaacaattaagtaaatactaggatggcaaacaggttccataatttcattttgttgagacaacagttttgctcatgtcaccaggctgaagtgcaatgttgtgatctctgctcactgcaacctccacctcccaggttcaagcaattctgcctcagcctcctgagtagctgggattataggcatgcaccaccatgcccaggtaatcttgtatttttagtacagatggggtttcactgtgttggccaggatggtcttgaactcctgacttcaggtgatctgcctgccttggcctcccaaagtgctggggttataggtgtgagccaccatgc

SEQ ID NO: 348 - DNA, 19633 bp, Homo sapiens
gcgcgcgagcaagatggccaccaccaagcgcgtcttgtacgtgggtgagcaggaggggttgctaggcggagtctgagtgaacgcgacccccaagggtcggggcgtggggtgggacgcatctctgaaccaggaggacggcgagctgctgtcaaggccgggtctctggcggtagtgctggcgatagctctggctgtgcttaaactccttccaaggtttcccactgtcctcaggaaaaagtgcagacttcttagcagtacgcacttctccagcttctttgctttgcttcccgattcgctgggtctcccgaaaaatgacccacttgcccccaaggttcaggttatttcacacctttgggcctctgcttttgcgactcccttgcagtgaacagccttgccacacacctcaggtgcgtgaacccgagacggaatgattattctgacttcctagcccgctgagctccagcgggccccgaggagcggtaaaggagtattatggcccttcggatcctctcgttcatttgttttacaaacattcagtgcagcgacggctcagccccagcccctgccataaaggaaggagttcccagactagccagaaaaaaagtggaattacctcagtagcacacttttgataagcgctgtagtgaggatggatcatgataatatgggcctggctgcgggacaaatgacccatccatctggagaagcgagggcaaattctggatgcggcgatgccagagctgatgagcaggagttagctacgtaaccgaagcagaggcaaggccgttcactgcaagggagtcgcaaaggtgtgaaatagcctgacacttgggggcaagtgggtcattattcgggagacccaggaaattaggaagcaaagcaaaaaagctggagaggtgggtactgctaaggagtttgcactttatcctgaggacagtgggaagcctttgaaggagtgtaagcgaaaagttacgggttcaaatttgcattttcctaagatcattctagttggctttgtggagttgatggaatggaggcagggaggtcagttgtgaagctattgcagtaatcccaggactagatgagagtctgaaagaagggcgaagagaggaatatttttcataagtatgggtgggcagagatgagagggggatgtttgtttacccaaagaactgaatggaagggtcctgtcccctggctagcatgctaactgggctgcaaggacttctgcaagagtatggagatcagtggctcagaaggcccttggcttatttgcaggtggactggcagaggaagtggacgacaaagttcttcatgctgcgttcattccttttggagacatcacagatattcagattcctctggattatgaaacaggtgagttagtgtctctcacgttcagaatcctcttactaggaaaataccttaaaaaattaaagtcacatcacaattctaaatatgcattctaaatatggttagtatacactacaggtaagttcaggaaggtgtctggtgacagtgatctcgatggagaaggaatgttctgaggccatgtggttgtgaactctgaatactttccagagtcttcagctgttgggttgagataagacagatttttcaatagaccagtagggagataggtttgaactacattgagatttgaatgttgttttaatctacctgatgggtaccccatcccacctgcaccttcttgcagctgtgctattaaatgaggcagcgggaaagcctagccccataatgggggtgggtgagggcgggggttcttggcctctgcacccctgggtgggtttcccatcgattggtatcacaaccacagttcagttttctgtttacctttgttgtcatttttaagattatagttttaggcctagttttatcatcaaccttgcatatgattgttagcaaagtctttaaactctctgggcctgggaaatctttatttgcaaaatgataaggttatgttggctttctaagggccttctagtctctgagttctatgataaacattattgtgcttggtctttctagttagttcagcattttcctgaagataaagactgagcatctttatcaggttttaggattcatgctttatgcacagttgatgcgcaaaatatatatttagatagataattgataggtcaaatgactttatttttctaattgctttgcatgcaatggttaaggttttaagtttggctttcgtagaataattgaatacttatcaattaaaaatacagtttactattcagctatgtccattaaaaaaacaaagtttattattgcttaaaatattgtataagaagaatcaagaatgagattccttcttcctaaatagtgattggatagaacttctggtgtttggatacgacatgtaactgacttcactttgtgaccatcctgtttcttcccactaccccacatagtaattacttgtttttgtttttccattttgtagaaaagcaccgaggatttgcttttgttgaatttgagttggcagaggtgagagtctgtgttactagtgtctagtccttggtttgtgatgttgttactgattacaaaggaagcttttcaccatttggttaggtttttgggccttaggctgatgcttccagagagatcagaagtaagtgctgttctaaggaaagcgtctctcacataatcagactggactgtgaataacatgtcagacctgccaggccctcccattcttgccctgcagaggagctagctcatgcacccctgttcattgagcattcttgcctggaagtagtgattatttcttgtgccttcaactagatggcaaattgttgcaccaccagctctaaaatcagccaggaagtgctctttgttagaaacacacaaaacctaggcaagaaatacagaggtggcatttttctggatttttgctactgagcatgtgtttagacaccataagaagcatttggctgcaagcctaaacttgtacctttgtctttccttggcaggatgctgcagcagctatcgacaacatggtatggctgggaatcttaattctaactaaagttgctttttggtggtacagaggctccttattcatatatcagtgttctggacttccaaagttacaaggttgcatggggaggtaaaaattctcacatgaaaatattcactgtgaattgatcacttataaaattagttcttactcagactccttcgccatttcagaataatgtaagtcctcatcatccttgttgaccagtctctcactggctctcccatgtttaggataatttgcagacacagtgcaaattgattgcacggtgtaactgcatattttgcaaaatagcaggatttcatgaagtgttagaccaatttacaattgagaagagaaatttaattatggcaggtgcaaatcactgatacaaatgatttggatattctggaaaggtccttgggaaaaatgatgatgctctttagtatttgtgccttccttgagatccttttagttttcatgtctgataagaagtgcaaagataccatactgttgatagaattttgttggaaaaataatacttcagtgcctgttacttttctttccttctttttttttttttttttttttaacaatcttgaactcatgagttcaagacttctcagcttctcaagtagctggaattacaggctcaagccaacagggctacctgggctacctgttacatttctttctaccaagttacatttctttctaccgattagtgcatagttagtcctgaatattaatggtaagaaacttgtttttattatttttagtttcatcacagtaatttcccagtcagccttttaaaatttttcaattttaccacgaaatcttcatcaccacttcaagtggagtcaccttaaatgacctttcctggtaccgattatctttggataatgagatgttgttttatttgttgttctgttatccattcaccaaacatattcatcagctgtcagagatcatttttctttcatttcaaagcttatcttgacttttgaaggtgaactcaaatactgggaaactgcatttatttttgtaattttggagtgttctgaacccagagttacttttggtaatacaggtctttgtgtgctgctatgaaagaaaggggtgtgagttccctgaaacccacaggtggctttggggtggctgcatagcttactggtagaggcccagggattaagggaggacaaatcatgagtgtgtctcagaagtatatggaaagctggctggccctcttttaacctaagagagtttaagcagctggattttcaatcttttcagaatgaatctgagctttttggacgtacaattcgtgtcaatttggccaaaccaatgagaattaaggaaggctcttccaggccaggtgagtaggagcaacttccagattccctgtgatgttctgcagtttggccttagttgcattttttgtctctatttacttggaagtagatgctaaatgctgcttcctggtagataggagtagatgatggttcacattgggaagggcatgcaccacctttttagagaaacaagtgagtttgagcttctcagcaaagccaaagtgattgtttctgttatgagagaaattcctgcctgagctcatctttcccagttttcttgatattccattcctggggtctccatcaagggctgaaatcagcaaaggctacacctttgctttcggcatagctattttccttagccctactgagagctggacttcagggcctacattctggatgggaactttccttacccctgggagttctcagtggggaattgtctggcatacaggccacatagcatcttccactttgctgaccaaagcagctacttttcagttcaagctgacagcttgaatgaacatttgtttgattctttcctttcagtttggtcagatgatgactggttgaagaagttttctgggaagacgcttgaagagaataaagaggaagaagggtcagagcctcccaaagcagagacccaggaggtgagaatgaagctcctgcttccagagcacaggccggcgctgtccacaggagacttttttttttaagttttaatggaaatttgccaatatgtatatcaaagtggagggaatgaataatgaattcttagtactttggtaaagtcaatattgagttcttagtactttggtaaagtcaatatcgagtgaattcaagggcgaaactttgggtctcttgtccatgttgtgttctatgtgatgagtgtctcagctctgctcaggtatggatttgtgattatcaactgacagggaggaagctgaggtgcccctcttcacccctcctgatcagtccccctccttcactgaagagtttgccacaagggtcgtggtcttcctattcctgtgctaatggaggggagacagaatagggtagtgtcccttccttcaacctgtacatgggttcagggttctccagtcctacgggaacctgctggggcacttccccctgattctcagcatagtctctgacagttgcttcctgggcgtcccctcctctgagtactttgtgaatgttgtcattcttctgtatttctttcttggctcatggtttctctctcttctctcagctgaaacagtagcagtctatctctagttttatgcagcctctgttatgctgttgatcttcatggtctctttctagtcctgagcttcagatatttctgcctgcaagtctcatgggcagcttaagtttgcctaaaatggattctcccgcttctctaatcctgtcttcctgtgttctcaatcttggctaatttgccaccattcatccacacattgacccacgccagaaatttgaatgcaaatcagaactcataaagtggccatcacagtcagtggagtccccctggatcatcctgtatcctctgcttagtcttacctacttggagcacaatgcaaggcccaacatcttccactgtcttctgagcacttaggcctgagcaagagggctgcccccttgcttccatgtagttagccagtgtatatgcagggccaggcacagagggacgaggtggtacatggatgggtctgcctaactagaggacagtgggtgggctggaactggcatttgaagatactgagagttgtggatcatggaccagaaaagtgctgttctgtgactgtgaagcaagaggaggaagcagatgcatctgagggcaagcatgatgagataacacccccgtgtgtgaggctcaggttagccagtgctgagacctcctgtcgctgggcatccagctgggtgctacggccatggctcctgcctcctgcagccctatcagggcccaaggccttccccgtcagcacttgctccagcctacgcactggagttgtgttctgggtgggtgtgtagaatactcgcactcctacttagggcgtcagggagctctctctaactagcaatttcttctgcacctagggagagcccattgctaaaaaggcccgctcaaatcctcaggtgtacatggacatcaagattgggaacaagccggctggccgcatccagatgctcctgcgttctgatgtcgtgcccatgacagcaggtgagcaggacgctgtggtcagaacggcgggacgctggtggctgagcagtgagcctttcccaggttcttactgcttcacttcttgtgtccttgatattgcttctgacctaagttgatttgaggcatctcagatcctgggatctagtaacagataagtcagagcaggtgtttttgaagctttataagtgctggcttactgttttttaatcgttttttaaaaatacaagtaaataatgtattcttttttttaaagaatagcatatacatatattccaataatatttaagacaataaattgaaaattcattttcccctctctacatccagtcctcaattctagaagtaactagtgcttttattgagtattctttgtaatttattaaatattgacttctattctctttttaatctaaattttattatctagacatataaagagtcaattcagtttcacaaagcttgttttgaaaaaacagtcgtcccctggtgctgtccctgtgccctgctgccaacaccatttgctgctcctcagaggagcggatttcaactcttaggtgttttggtttttatttccatgttgataacagttttatatttctacttcctgttttccattttaaacattatcttctgattttctacttcagagaacaaagaattagttttttaaaatccccttccctgccccctcatcttccctgtataggtaccataattttggttaggtcctaagttattttaacaatgtaagcatcatgtgataacctcctttcatgcacagcattttgttttgcctggaattgataattgccttgtttttgcatagttttctgtgtaatcattcctgattttctcccagaccatcctgctgggggttttgcatccaggtgtctgcatcttgttaaggggagatgagggcaaggctgaattcctcaacattcagtatataaactttcacataatctccatttgtcattatggtacctcagccctcactatgcgtaggatgtcctagtccagagaccctctgctttaacctaccaaagactagacccccagctggctaccaggttggggaggggtggcccccagctgcagagtcagggaaaggatcccaaagattaaccactttcttaaatgggctttcagccaaacttactgtctccaggattacctgcaccctttcctctgagcttttggagtgcaaattgagttgcttcttggcttttaccagcttaagattcagctttctcgggtctgctatatcatttaggactcatctattttgttttctaacttcagaaattttgttgctgttgtctcttcctccctgctttttaagtttattttttggctattttagccactttaaagtgtttgttagcagtaattactctgttcgaaatttttgaatcatcctaaacaaaaccacttattaaaggtacctattaaataataactccccattttctcctccccttagcttctgataacctctaatctttgtgtctatgaattggcctatcctagatttttcatgtaagtggaatcatacaatagctgtccttttccacgccttgttgattttgcatagcataatgctttcaaggttcatccttgtaccatgtatcagtgcctcattcctttttgtggctgaataatattccgttgtatttggataaatatcttgttcattcatttgttgatgggcacttgcacattgttttcaccttttgactattgtaaatgcctgtgtgaatatccacatgtaagtatatgtttaaattcctgttttcaattcttttggatatatatgcctaggaatggaaatgcttagtcatatggtaactctgtatttaactttttgaggaaatgccaaactattttccacagtggctggaccattttacatttctaccagcaatgtatgagtgtttcagtttttccacatcttctctttttttttttttttttttttttttgagacagagtctcgcactgttgcccgggctggagtacagtggcgtgatattggctcactgcaacctccgcctcccaggttcaagtgattcttgtgcctcagcctcccgagtagctgggattacaggcgtctgccaccatgcccagccaattttttgtatttttagtagagacgaggtttcaccatgttggttggccaggctggtctcaaactcctgacctcatgattcgcctgcctcggcctcccatagtgctgggattacaggcgtgagccaccatgcctggcccacatcttctcttaacaggtgtgacatggcatctcattgtggtttttatttttattccctactgactaatgatgttgaacatcttttcatgtgcttgttgaccatttgtatatcttctttggagaaacatcttttcaaatctttggcttatttattaactggattgtttgttttgttttttttaagagacagggtcttgctctgactcccaggctggagtgcagtggtgagaacatggcttactgtagctttgaacccttgacctccagtgatcctcctgccttgacctcccaaagcactgggattacaccgtgcctggccattttgttgttgaattataggagttcattatatattctggatattaaacccatgttaaatatgatttgcaaataagcattctcctgttctgtgggttgctttgccctctattggtacggttctttgatgcacgtcttaaattttgataaaatctaattatttttttctttcacctctgcttttggtgtgacatttaagaaaccatcaccaaatccagagtcatgaagatttgcccctatgttttcttctaagatcctttggtttttcttttaaaaaatcagtttcctaccaatttagtgtggttttaaaagggaacagagctcgaacatgtatattcaatcccccttcaacagaatctcctatagtcctggccaggtgtggtggtttacacctgtaatcccagcactttgggaggccaaggtgggcggatcatctgaggtaggagttctagaccagcttggccaacatagtgaaaccccatctctactaaaaatacaaaattagccaggtgtatggtacatgcctgtagtcccagctactcaagaggctgaggcaggggaatgacttgaacccaagaggtggaagttgcagtgaactgagattgtgccattgcactgcagcatgggcaacaagagtgaaactccgtctcaaggaaaaagaatcccttatagtccttacaaggttagtatcacaaaggtttataatgagtatctcttattttaaaacaaaaatatgaacactaaaccaaagttttttcgaggttttttattttgtcctattttttaaccccagcgctttttcctttctcaattccagagaatttccgctgcctgtgcactcatgaaaagggctttggctttaagggaagcagcttccaccgcatcatcccccagttcatgtgccagggcggtgatttcacaaaccacaatggcactgggggcaagtccatctatgggaagaagttcgatgatgaaaactttatcctcaagcatacgggaccaggtaggagccagttggcatgtggtgacgagggaggctgggcaagggtgggatggccaggcaggatggaaggacaggttgtagttctggctggcggacactaagagtctggaggagacccagccaccagacataggagaaccatgcagccttgctagggtggagttggcttgttgacattcaggtactgttcatcccccaaccgtgtccacaattcctattagccccgcttggattctgtggtctgctgttgcaggctcttatgctctcaaccccactgctctccctgccctcaccatcagatttactcagtaaaatctcggtggttagtcccccagcaactagagaaaaaacacagaattgtactgaacaatcccacttgaaatttataactatagttcttaaggggacccttgccaacctgaccagatttccctacttgatgctcagtcccaaccggagatgatgtgtccatgcccgtcttcacttctgaagccctcatatcatcaccttcccacctcatctaatgcttcacctcctgcatctctccactcgtgcatgctctttcttccaattacaggggatgagctgtctctcctaggccagcctctccacctgtggactggatcctgtccctctcctctacttaggaacatggcttctaaagttgtccccttcttgtaatccatttcccctgctctgctagatcagtccattagcatgaaagcatgcagttatcaacctttaaaaaaaatcttcatccggttgccgggtgcagtggcttagtcctgtaatcccagcattttgggaggcagaggcaggcggatcacctgaggtcaggagttggaggccagcctaactaacatggagaaaccccatctctactaaaaatataaaattagccgggcttggtgggcgcgtgcctgttatcctagctgctcgaaaggctgaggcaggagaatcacttgaacctgggaggcggaggttgtgatgagccaagatcgcaccattgcactccagcctgggcaacaagagcgaaactccgtctcggaaaaaaaaaaacaaacttcatccttgtactcttgttccctctccagctatcacccatgcccctggtcccccatcttttttcaagaagtaaaagcataacttcttgaaaacatggtacagacttgctgccttcgcgttttctctaatcccttctaggcagacttctagtcccatctcgccattgaaaccactcttgccaaaaatacgagtagccagttcttggcgatcatcttatcccacctcccagatgttatcccacctcccaggagcatttcatactacaggttgagtgtccctttcctgaaatgcttgggaccagaagtattttgtattttggaatatttgcattatacttaccagttgagcatcccaaatctgaatatctcaaatctgaaatgctcgagtgagcagttcctttgagtatcatatcagtgctcgtgaagtttcagattttggggcattttggattttggattttcacatttgggatgctcagcctgtactaactctgttctccttgactccttcttcacttggctggcaggactcctgcctcttcttgtctccttttacctagatggctgctttttctgtctttgctgtctccttcttttcctgacccttaaacactgaagtggctcagagcccattctttggttctccagaagcctgttaccctgtgctccgtttttctaactggtggtttgtagggcccctctttactatactgaactgacatgtgtaggtgatatagcccactgacccacatcgttattttaaaaatcagtattcatctgtaactataatagggaagaacatcagaggaaataaacgaatttgtataatactcgaatatgtttccagatgtacatgcttaagcacagctgtgtcagaacacaaagtgaattattcaggcgtctgcccctgtactcaaacgcagcagttagaaatgcagacgggagtgtcaactggataccactaggagtgatgctattggtgatacggctttgtgaaatggtagataaagttgattagagtccaaagtaaagaataatctgtttatttacatagtagttacattcctagaagattccatggaaaatcaaaagcactccaaaactttgggcttatatgtataatggaattatgttttaggtgcagataactgtaaacacattttttacctataccaatatctggcaggatatttgttgttttgttgttgtttggtttttgttttttttgagacagggtctctttctgttgctcaggctggagtgcagtggtgcaagacggctcactgcagcctcaacctctccagctcaagcagtcctgcctcagcctcccaaatagctgggattataggtgcacgccatccataatgccaggctaatttttaagttttttgtagagacagggtttcattatattgctcaggctagtctggaactcttagcttcaagtgatcctcccacttcagcctcccagagtgctgggattacaagcattagccactgcgcccagcctctagcaggatgtttgtaagggccaagaggatatgagacaattcattgtgccagacattgcagaacatctagcattccaggcccccacctgctaaatgccagtagcacccccacaatatttcagacagtcaaaaacactttcaggccaggcacggcggctcatgcctgtaatcccaacactttgggagtctgaagtggcagcccaaagccagaggatcacgtgagttcaggagttcgagaccagcctgggcaacatagtgagaccctatatctactgaaaaaagaataaaaaaattatccaggtgtggtggtgcacgcctgtagtctcagccgcttgggagttgaggtgagaggattgcttgtgccccagagattgaggctacagtgagctgtgatgcactcctgtactcagcctgggtgacagagtgatccccatctcaaaaaaagtaaattcagatttccaaaggtttcctagggacaggacaccaaccccactgagaagcagtgccctaagcagtcacacccggtcccagggctttcagcggtatctctgagttaagtttgtgcagactggcatctgcatgctgatggctccctgagctccagactcctgtccaactgcctgcctgttgtcttcactggatatcccacgagcatctcacactttacatgtctaaaacagctcttggccttctcccctaaactcttcctcctcctcttccctgtttcaataaatgactccaccatccacttagccgcttgatcagaaacttaggagtcattgtggacacacacacacatacatacatgtacacatacacacacagacacacacatatacatgtacattctcttacgtgacaaatgtccatgttaccaggcctcactgtgtcatagctgtcattttgaatggctcttttccactgattgtgagctccaccagagcttggactatgttctgctcatcagtgttcccagggcttaacagggacctggttgtcaagtagacacttaattgttaaataaatgaattaatgaaagaacagaccagtataaagtgattgaaacacctcacttaccatttcactgactattaactgaatccaagataaggtggccgcatttgcatgtgatctgtgcatccccgagtctgagcctgactggctgaagggctgtcaacagcctgcacagacgtcctttaagggctggtagccagggttcggggagctgatggttgttctctccctcaggtctactatccatggccaactctggcccaaacaccaatggctctcagttcttcctgacatgtgacaagacagactggctggatggcaagcatgtggtgtttggagaggtcaccgaaggcctagatgtcttgcggcaaattgaggtatgtggccaggaatgggcctcctccttacccaggccctaggagcacagccctgtgtgagggctggagagtctctgtggcctgagagagatggccaggggctgtgtccagcgggaggggctgctgctgcccaggttccggggtggaagtgggcaaatgggcaggcaggggttggtatccctaaaccactgttagtctccggccttactccctcacttctattctgccacaaaggcccagggcagcaaggacgggaagccaaagcagaaggtgatcatcgccgactgtggggagtacgtgtgaggcggcactctctctgcttccccctccgctcttgaccctgcatatccaggaaggaactgccagcctcagaggaggcagcaccgagggtgcctgtttgaagcaagcagcatttgggatatgtgcccttcctcagggtctgcttggagcagctcctctgcaggcacagcctggactattcccaggcacagctgtgggcccaggagccagctcaggtgctcccctccaccatgggcaggctgtgcaaaaagccactggcttttctcagcatttgctgctgggcctctcctgggactaccagtgtggctcttacgtgttttctttgctaaaataaaccctagttcttatattgctcttcctgctagttcttgggagttgtcagagattgtgtctgtggctaagctggacctctgaggcaggctggtgagtggggagagcagagcatctttttcacagctttcatttcctcccttgggccgatccccttagatgtcaggtgatgtatcttcacaccaggcatcgatgtcagggcaacggaaattaaagactggaaagctccggtcttctgctgcctctgctcctaaacccagctgccggccttacagccagcaagtgtactctcagtggttcatttgtttatttgttcactttcaccctacagattttaaaaaatgaaatttttataactcaaagtgccttctctgtgccaagtactatgcctatttgtcaggagacaggaagccaacaaactacatgtgcctaatccagcccactgcctgtttttatgaatcaggttttattggaacacagccacgtccatttatttacatattgtccatggtggtttcttactgcagtggcagaggtgcgtaaggggctatagacacaatacaggctatggtccctgtattagggttttctagagaagcagaaccaatagggtgtgtatatatgtagaaagagatttattttaaggaactggctcaagcagtggtaggagctggcaagtctgcaatctgcacaacagaccagcaggctggagactcaggaaaaaaactgatgttgcagttcagctctgaggcagtttggaagcagaattcttcctccagtgatctcagtcttttttctcttaagaatttcaactgattggatgaggcctacccacattatggagggtaatctgctttactctctactgacttaaatattaatccatctaaaaaataggccaggcatggtggctcatgcctataattccaccactattgggaggctgaggcaggaggatcacttgagcccaggagttcaagaccagcctgggcaatgtagagacccccatctctagggggagaaaaaaaagccaggtatggtagtgcacacctatagtcccagctactcagaaggctgaggtgggaggatcgcttgaacctgggaggttgaggctgcagtcagccatggtcatgccactgtactccagcctgggtgacaagagggagaccctgtcttgaaaaaaagaaaccatcatcacagcaacatctagactagtgtttgactaaaaactggataccatggcctagccaaattgacacacaaaatagaccatcacagtcccaaggcctaaaatacttactatctgagcctttacaaaacaggattgccagccactgaagagaacaaatggtcccaccccctgctgagctcacagtctggctctcctgtgtgcagccacttcttggagctggcttctctccactccccctccagatgctggtcagccaggcggttataaagaatctcatctgctgaaggcttttagcagggactgagtcctgtagctgttggacacctcctgtgggttgggtcactcagaccattcagaatccactgagctgagcttttgcatcttggattgagatctggatgagccaggaggcaggagaggctaggtggtcctcatgaccctaggatagctcttgctgagggatggtggcattctgccctacctctggctcccatgtgccgactggactttgtgagctccagctgctacagttgactgagttcaggctccatgtagctgggatatactacatggttacccctcacccctatggagcttccaaaagagaccctccctcaaagcacagccccttctctgagtgcaaataatggccatcagaggtcagtcacaggtgttaggcaggcatctatgaagctggggatgatagcactgacttcagtgcttggacgagaaccaggagagagtgtgtagaaaaagcacagccagcctcccataaaaggacagactcctgtgacaaccttgtcactctgttcctccctgatactctggggaggtggaggccagtgggcagttctgaaagctcagcaggtttggagccattgggtgtggactcctctcccagtgttcctcctgggtgttcacagatgttattgaatgcacactggaaccctgcacaggtaaactgaggctttattggcgtgactgccaaaggtcacacagggtggtttggcagagctgggattagaagcccagcctgtctctcttcagtagtaatggagtcctgggaggtttactaggctttagcctcaatctgtggcggcagggtccacagccctggggagtgacacagtcatggtccccatgattggccaggacctgtgtggagagacacaggagacaagaccctgctcttccaggccagaagggaggggagccccagagctgggcagtggcatgccccacagcctggccacctgcttcggctacgcaccatgcagcagctgcacctggctgcctcgggaaaactctgacctctctgggaagtggagccagtggctctgtgggcgtcctttcctgcagcctggagagcaaagcggctttccctgggactgtgtggctcctgtcccaactggcctccccattccacattcccattgctggaccagcaccaggactgggcacagggcttccttttgctgattcatttcccccctaactcattcagagttgagccccatctgagtccccacatgctggccctgaaacggttacaaaggctgaaaccagggatggcaggcccaggatcagtgctgtggctgttggagtgtcctctccaacagcatgacagccgcctccaggtgctcccagcatctgttgcagtcatggcagcctcacggcaacctctgaagaaggaattatagaaccaactttttattgttgaaaatggagtcttgtagagttcagtgatgggaaactaaagtagaaaaagcacatcacaaagaaacatatatagtacagtgtgatcccaattttgtaaaaatatctgtaatatgtaagcataggtatttgtatatcttaagaaaaaaagcctagaaataaagccacaaaaatattaatagtgtgtttatttgacttgtgggactgtagtgatttgaattgtattttattttttatatatcccactttcctccaaaactgcattatttttttgagaagtgaaagacatttttgaaaaagggggtcaagtgcccatccagggttcctttcaaaaagggggccaagcagttgacctggatgggcagttcccccatgcaaattgccacccaagacacctggtgggtacagacctctctcagcaggacatgggatcccattgtctgggaacacagcaaagtttcacagccgctgccacaagtgacacttgctaggcctttaaaggctataagaatacaagtcccgccctctgagggatgccatgtgtagatggtttaggaaagagcacagctctgaaataaatacatcatcacctgcagaacacattttggtttaatggacagacatagaagtggctcaaaaataagcaaattcatttgtaataataccagcaaatacctattgttaagcatttatatgtcagacatcccaaagatttgtgtacatatttagtctttataatagctttgggaggaaagaaccaatatcatactctacaaaggaagaagcagaaccaggattcaaatctatttggcaccaaaaatctgcctcttgctacactgcctctattcctgtttctttggaccttttccagaacatgttacttccctgcctcagttagaagttagtgactacgaatcccctgctgacttggcctcaaggccagtattgcaccgcaaggaccaagactgctgggcattcctcttttgcctgttgtatgcgtcctctcttcctgtcaactgtcattgatttctcattgctgtcagtagatctgaaacaaccaccaccatcatccttccaaccctcatctggtgcaacgagataaacaggccatgccctgagcaaagaaaagggaaatggtggtatctgtgctgccagcctgggccacccactgcagatgcacatgcttggctcagcaaacggataaggattaaattcatggactttgtgttcattcacaattgtttcattgctcaagggatttttctattttatttcatttggtgactatctggatgataaaagttgctgaaagtctgatggccaactaggtagacaaagccttatgtttttccattgttctgtatgaaccaggaggatcacggctcgtattggttcctgctatgcacagcttgattaatgggtaaggtgtactccatatctacaaaccttcaggtagtttacagacattcttggtgcacccctaactatgccagatcattggctgggcactaaagatacaggtggagtaaaaaattaattgtcaaaataactggctaatttaaaatttacaattgcctagaagaccatctttgatgttaagaaggaacaattaagtaaatactaggatggcaaacaggttccataatttcattttgttgagacaacagttttgctcatgtcaccaggctgaagtgcaatgttgtgatctctgctcactgcaacctccacctcccaggttcaagcaattctgcctcagcctcctgagtagctgggattataggcatgcaccaccatgcccaggtaatcttgtatttttagtacagacggggtttcactgtgttggccaggatggtcttgaactcctgacttcaggtgatctgcctgccttggcctcccaaagtgctggggttataggtgtgagccaccatgc

SEQ ID NO: 349 - DNA, 314 bp, Homo sapiens
aaaaaaaaaattagctgggcatggtgacgtgcacctgtactcccagctgctactcgggaggctaaggtgggaggatcatttgaggctgggaggttgaggctgcagtgaaccatgatcatgtcactgccttccagcctgggtaagagagcaagaccctgtctcaaagaaaaaaagaaaaaaaaaatcaccctggacaagtggattggaggaacagagccactatcaactcttccttagtctactacattaacttcctggtctcctgggttccaatcaacccatcctgggcctagtgtcagagcactgtctaaaat

SEQ ID NO: 350 - DNA, 599 bp, Homo sapiens
aaatgtccatgctcttacatgtctttcctagatggcagaggcaaatgcaaagcaggaagacaagggaagataaatgccattggctttagccctaaatcatgctgttcactcagctttttcttgagttgactccacatgtctacctgtgaccagtggatcagtgcttcagatccatgaatatacaatacttcaggggttatccagttttataccccaccttgcacctcgggcaggcaatggggagccaaccagaccctgactacacacaccacaccctgtgatggatggtgaagagctcaaggtggccaacagtgggctccaggtgcctctcaggtcattccacatctatctcacgacctgagccagtaaggggcatggataggacctcagacaggacttctgtgccaaccccaaagaaccagccaggacatgcctccgggagaggcgtttgcatttgggtagaacactgcctgatgattgagaccacctgggctggaaacaggacagtcacacaaatgcctggcagggcaaggggagcataggagcctggcatgaaggagaaagggtcatgtacgtggttgtgagggtcctccctggca

SEQ ID NO: 351 - DNA, 3310 bp, Homo sapiens
gtccaaggaaaagcctggaggctggtatagcacattccgtcgagggaagaaggtgagtcaccgaggccgagatggggagtgacatgaaaattgatgggaaccagcaggggggtttgaggggtgggttctgagaggtgagatgaagaggataggctttcctctaccttcctagggatcgcaagctggaggtggggtggcagcagcatcagatgtgtaacaggcagtcaattgccatacagaatgatggtgccaggataggggaagcacagggcatggtggaaatttagaggcagtgttggaaagaccagaaggcttcctagtagagatcacagctcatctgaagcctaaagaatgcactgtgttagcaagctaggaaggacaaggacaagtgttccagggagagggaaaggcatatgcaaaggctcagtcaagacagggtctggtgaatttgaagaagaaaaagccacatggctgggtacagtggcctgtaattccagcactttgggaggccaaggtaggcggatcacctgaggtcaggagttcaagaccagcctggccaacattgtaaaaccccatctctgctaaaaatacaaaaaattagccagacatggtgatgtgtgcctgtaatcccagctactcaggaggctgaggcaggaaaatcacttgagccctggaggaagaggttgcagtgagccaaaaccgtgccactgcactccagcctgggcaacagagcgagattccgtctcaaaaaaaaaaaaagcattattaagatattttgtatttttttcagattagctcttcaaaatctgatggagattttacatttatagtacatcacaatttgaatgctaaattttattgggaatatttgctctatatttagatttcataaaaccattgaacaacagttcaaaaagtagattcagactcaagttgttccaagcataagctttctgataactggattgaagctcagtcattagttgtgaatttttttaagtaaaagaattcagggccaggcacagtggctcacgcctgtaatcccagcactttgggaggccaaggtgggcggatcacgaggtcaggagatcgagaccatcctggctaacatggtgaaaccccgtctctactaaaaatacaaaaaattagccgggcgtggtggcaggcgcccgtagtcccagttacttgggaggctgaggcaggagaaaggcgtgaacccgggaggcggagcttgcagtgagctgagaccatgccactgcactccagcctgggcgacagagcaagactccgtctcaaaaaaaaaaaaaaaaattaaatgaagttaaaaaaaaaaaaagtcccagccaggcatggtggtgtgcacctatagtcccagctacttgggaggctgagatgggaggatgacttgagctcaggagatggaggctggaatgagccaggattgtgccagtgcaccccaacttgcgcgaaagagcaagatcccaacccttaccccccaaaaaaggaaaaaaaattaaataaagtaaaaaaaaatccctccttcaaatcagccacatttcaagtgctcaaaagccacgtggctattagacatgtggctgccatattggacagggcagaaatctggtatcagggacagtgagctctgtagatccagcgactcacaagagtggaggcagagttgtgtcttctgggtggggatgagtgtgttaaaaccctggattggtggatgaagcaatcagaatttgggaggtcagatggagtgggcatggaggcctactggatggagaggtggacagagtggatgttcaggtgactcttgggattctgccagggatctctaggtggctggtgggacctcctcagagatggtgacatggggggggtggcttgtctgccagtggatggagattccagggggtggcttctgcagaaagaggctcatggagcccctcatcctctgccttgccctcctctcaccagttctcctacgtggacgccgacgggtccccagtgaatgtcgtgcagctgaacttcctgaaactgctgagtgccacagctcgccagaacttcacctactcctgccagaatgcagctgcctggctggacgaagccacgggtgactacagccactccgcccgcttccttggcaccaatggagaggagctgtctttcaaccagacgacagcagccactgtcagcgtcccccaggatggctgccgggtaagagggtggggcagtggccagctagagaggggaggcaagatgtcggccaccttcccggtaactcaccgtctctgtcttctctggggacagctccggaaaggacagacgaagacccttttcgaattcagctcttctcgagcgggatttctgcccctgtgggatgtggcggccactgactttggccagacgaaccaaaagtttgggtttgaactgggccccgtctgcttcagcagctgagagtgtccggggtgggagggaccatgagggagccccagaatggggtgcatttggtgctgaggctttgaagccaccgtatttttcgttacctgtgactatggagccaatgggatgtgacttcgctcatcacggacagtcattccttctcctttccagggtgctgggggctggggttccctggcccaagggtccagcctcctctcaccccattccaggtggcatactgcagtctggctctttctcccctccctccccacccaagcctcacctccccaccccttgaacccccatgcaatgagcttctaactcagagctgatgaacaaaagcccccccacccccaatgcctgcctcctcactcctccgtcgctgcccttcacaccttttggtgctacccctccccagagttaagcactggatgtctcctgatcccaggctgggacccctacccccaccccctttgatcctttctacttccacggtgaaaggactgaggtcggactacagagggaagagggacttcccttgactgggttgtgtttcttttcctgcctcagcccagctctgcaaatcccctccccctgccccccacctccccaggctcaccttgccatgccaggtggtttggggaccaagatgttgggggggtgaatcaggatcctaatggtgctgccctatttatacctgggtctgtattaaaagggaaagtcccccctgttgtagatttcatctgcttcctccttagggaaggctgggatatgatgagagattccagcccaagcctggccccccaccgccaggccatagggcataatttgcatctcaaatctgagaataaactgatgaactgtg

SEQ ID NO: 352 - DNA, 495 bp, Homo sapiens
actgtaacctaaagcactgggattaagcagtgggagaaagccactgtgcccagccccatattgttttgttcttttgagacatagtctcactctgttgcccaggctggagtgcagtggcgtgatcttggttcactgcaacttccacctccccagttcaagcaattctcctgccttagcctcccgagtagctgagattacaggtgcctgtcaccacacctggctcattttgtattgtatttttagcagagacggggtttcaccatgttggccaggctggtctcaaactcatggcctcgagtgatccacccatctcggcctcccaaagtgctgagattacaggtttgagccaccgcgcctggccccatgttgttatttttaactggtttattttctcctggtttagtgggagctcagatgcccagtggatgggaatttagacaagcttggacttcccactgggcccggagtgcaagacttgatccctaaacaattact

SEQ ID NO: 353 - DNA, 5252 bp, Homo sapiens
gtggctcatgcctgtaatcccagcactttgggaggctgaggtgggcggatcacaaggtcaggagattgagaccatcctggccaacatggtgaaaccccatctctactaaaatacaaagttagccaggcgtggtgatgtgcgcctgtagtcccagctactcgggaggctgaggcagggggatcacttgaacctgggcggtggaggttgcagtgagccgagattgtgccactgcactccagcctgggcaacagagcgagacttcttctttaaaaaaaaaaaaaaaaaacaaaaaacaacaacaaaaaaaaacttcaacatatcttctggggacagaagtttacccacaacattaagtgatataaaaggcctgaactgaagctgcaaggctttatataaccaattacccttgaaggtctagactgtcacttctgctacattctatttatcaagaaagtctctactttttgttcaaattcaagtgtaagaaaattagattttatatctccatgagaggagggctgaagaattaccactgtttcacacctattttgctccctttttactttttcctattcttttttctttttctctatctctctctctctggtgtactttaattctttaagttaaatgcatttattatgcagctcccctaaaagactgataaaaacatttgaaaaaatcctttttgttttagaatatttctatgatttttaatcaaaagttttcctgagagtttgtggggtatattactgtgtgtatgagacaggcggtgggaggaagggagaaagagagagagagaaagagacagacagacagagagacagaggaaggtaaggtagaatggggaaagaaaagtttgtgtagtaaaagcattaaaatgaatagcctgtgctggatcctcccacagatccccacgattgatgaaatgccttctcaccaaataccaagtacaagcattctttctatttctagaagttgatctgctctttactcagaatagcctagatcaggtagaaattgaatagtttctagagctcccatttaagagatcatggaacagatttattgaaaaggaaaggaacctgtgctgtctccagaagaaatcctgtttggaaacaattgggacactgcatgcatttgccttatgatgtctctgatatgttactgttttgaggttctaaaatattgaatgtataactcttccatttctggcacttggctgccacattaggatttctttctcaaacaggtacctccagagaacatacagttatgcgcattttgaataaaaagctatttgtctttcatgtgacaaatgaatcacttggatcatttttctttgtaattgtaaaaaggtagaattatttttcaaaaatgtttattgtttttcctaccaagatgctctttccctggcccttctctacttcgcttcttcccgaagaagggctatattttctgcccactgatgtcacacttggccacttgacttgcttcaaccatataaactgagtgcaaggggtctgtgtcactcctgagtgcaaactgcaggagccatcatatggttctgttatcactctgccagagactggcatgtcccagcaggaggatctgcatcttgggatgatggagcagagcccatgtcacttcacaatgacaatacaatatgagccagaaaaaaactttgagtgttttaagtccctgaaatattcatattgtctgtggctgtagcataactcaaaatggctgacacattgtctatgaacataaaaacttccctgggaaatggaatatgtgctttctcaaaggggcagagcctgtccatttctgtatggctctgagaagatatctatggatacacagaacttgatattccattcacctggatcttggagtgaggtagttggattcaatgattatattattgagatcttcagtttatttgatttccatttttatctgtgtgacattgagcaaatcaagcaaattaccaaatttcttaagcatccgtcacctcacctagaaaatagaggtggtaatgcattgcctcatgggattattgagagaatttaataatctaaagcagtggtcctcagtggaggcaattttgccaccaggggaaatgtgaaaatgacaggaggcatttctgattgcttcaacggagcagagagtactactgtcatctagagggtagaggcctgggatgctgtaaaacattccacaatccacaggactctccccccacaataaatcactttctggctccaaatattaagagttctgcaactgagaaaccctgagataaagcaaagtgcttacttacctaccccaagtttgggcactcggtgagagaaaaatgtttgtcatatacaatattatttaatgggcttaaataacagcctgatcatattttgcaattatgagtttattcatcaaccccaattttttaagtttaccatcaatatctgtgtttgactacaaatatataattatagaaaaatgatcagtctttgagatagtttggcagtggcattctgtaaatccaacagtggttataccagtagtaaaatagaagatgcttataattctctcaagtttcatagaattttttatgatatacttcaatttctgataattattgtgggcatacaatgtattttagacagggtttataaaaccatatgcatttaaaatattatataaatatgtagtgcataaaaataaactgcctgaataataaatatatttacccaaaaagtaaataaaacagctcataagaagctgttccaattatttaggtaaatactaccttctgtgtttgactttctttcattgctttgagtcatgggaataaaaccaaaatactttcttgcaatgaaattgggaaatgacatcacctaaagcatcccaaaaatctaatataaaagtgtcattatcctaactctctccctttgtcagtgcccaagggcattccagaattgcttcagaagtctgattttcctcacaagaaactctactgtagctgataattaagaacaggaatgaattgtgtggaaagctgttggtctttatagaaagactggcagatacttgggttctagtgttggtaactaaccttctagtgatcttgaaatattcattttctggccagatgcggtgtctcaagcctgtaatccgagcactttgggaggccaaggcagacagatcacttgaggccaggagttctagagcagcctggccaacgtggtaaaactctgtctctactaaaaacacaaaaattagctgggtgtggtgatgtgtgcctgttaatcccagctaatctggaggctgaggcaggaaaatcgcttgaactggggaggcagaggctgcagtgagctgagattgtgccactgcactccagcctggacaacagagcaagactctgtcttaaataaaataaaataaaataaaataaataaaaaataataataaggcctgatgtggtggctcatgcctgtaatcccagcactttgggagcccgaggtgggcagatcacgaggtcaagagatcgggaccatcctggccaacatggtgaaaccccgtctctgctaaaaatacaaaaattagctgggcgtgggggtgggaaaataaacactcattttctaggcatgaatttactcatttctaagatgagtgtatagaattagatcttgtctgtttctttccagcaataaattatatgaattcatgtctccacttgctctattttacatacatatcttttaagcttcataggaacactgtccttgttttgaatggcatttaaatgaaaacaagccttctaaagagagtcttagcattgctttccctctttgagccttgttttgcttttaggttgtagctggctgggatttgtttttgtttttgttttcttttaatttaaaaatctagcagaaggctagtctttatcattgaaaaataaaaaataaaactattctcataaatgttttaattagcaaacaataatagcaataataatagctatcacattctggtaacatgctatgtgccaagctttgtgctatattttgcatacattatctcagttacttatcaaaataacccagagatagagacattattacttattttacctgtgagttaactaagatttagaaaaaaattcaaggtcacataatatgtgtgactctcataaagactgtcaagccaaagcatgcttttaacctccatgccttaaatctgaaacaccgttagttgacatctctcactgaaaataatcacaacatcgacttcttagaaagataagatacatttgtctttcctgaatatatgatttgcttttgctgttttgtggagatgttccttgttctttgtatgtgtcttctcatgtgtgtctctgtactcacattgctagctgtgcggtctttgtctcccttcctctcatgccagctagtggcatgatggagagactgtggtctagactgaggattatgacagcatacaaaactgactcaacacttacaggtaaataaaatgagcagtggtttcctttatttatttctgttatccactacatagattccatgtggatttaagaaactcaaattcaagtagaaatatctattaatagctattaaccaatcatgcatctcatgtcttaggagattctatcctgtagataaaatgaggaaatcatttattgactgcctttttgggaaataactctatggtctctagaagacatcttcgtttacttcaagtgccatggctttgagtttcattcaggaagatggtccaaaatatgagaatgtgtttattcttttaagatatgtaaattgtttatatcaatatcaacttatcctttttgggagagaaatacataagtagtacttcactttcattagttatttaacattcaaaatctctcaagtcatttaaccaggtgcaatggctcatgcctataatcccagcactttaggaggctgaggcaggaggattgcttgggcccaggagttcaagaccatcctaggcacacagtgagacctcaatctctacaaaaaagaaaaaaaaaattagcctgatgtggtggcatgtgcttgtggtccagctacttagaagtctgagtggggaggatctcttgagcccaggaagttgaggctacagtgagcagtgatcgtaccactgcactccagcctgggcaacggagtgagaccctgtctcaaaaaaaaaaaaaaaaaaaaaaaaagttattt

SEQ ID NO: 354 - DNA, 3975 bp, Homo sapiens
gatcctgaaatggaaaatgaagaacaaccatcctctgaaaatgattctcagaatcagagtggtgaacagatttcatcaagttctcaggaggttgatttggttgatcaagagtcttctgaggaaaattctctaaattctcacccagaatcattatctctagcagatatggacaatgctgcaagcatttccccttctgaacagacttctaatcccacagaaaaccatgagactacaaatcttaatggtgaatgtacagatttagataaccagcttcaagaacaatcagaaactgaggaagattccaatcctaatgttagctggggtaaaaaggtccagcctatagactccatattagcagactggaatgaagatatagaagcatttgaaatgatggagaaggatgagctatgacttgctaaacaatctgttggtaggtatttaaaaagaaaaggtaaactgtgtgtggttaatagacatcctaatactaagcaggctttctaatgggaggctttaagtatggtgatgaacaaccacgttctgactggcgtagttatcgtaggaatctggagcatgctgtgttagaattgaccttgtttaaaactgtcccatcaaaaatggaaatccacagttcccccttcaaatgcagcactgcaccaccctgcaacacctcaggccagggaaagattactgagcattcctgcgaaccagatttctgttgtctctggatagacaagaaacaaaattcatttagtagtggagtggggaataggagtttggatagccttctaattaaaggaagctcgcctttcttggttttgggggttagaggctcttttgggaagatgcatccgagtattgtggcattctgattatgctgccttcacaaaacactctaagtgacctaagtggttatgaagcaaatgcatttatggtgaaaacagtctttgctcattgctttctcttgtttcatttagtgacaaatgatcaagatgacttgattttttttccttcttaacaatgtcttttttatttaaaccaaaggtgaagccagtgtactttctcagtgagttctctgcataaagactaatcagtgggaccaggtaaaaaggtcatataatacattgtggagattgcttacttaatacttctgaaaaatggagtaagggagaaactgtaatgttgcaatatgaacctcccattgggccttccatagggaaagctgtgactactctgaaatggaacctagcattatatccttgtagggtagattataaatcatttccagttcatttctcttagaggtgattacctctagccatcagccttactccatcccatgtttggtatgcaatttgagccacaaggctcgtatcgccaacagctatatacattttgttccatttttctgtcttacagagccatgatagaactgtggttagtgagttaaaattcctggagtaactactgtttttctcctttgaaacttaggtttctaaagttgcacctaaggaatctgtcacattttctgttgaatcatggtttttgtttttgtttttaacagatattccttctgatacggacttgaaaattagtgtatggtgacctgtgtttaaaaaaaaaagtacaatacaactacatatagctatatagcttaatgagacttccaccccccccctttttttttttggtttgttgttgttgtagtagtctggtgctggccacatttaagtcttaaaaatttttaaattttgttgttgatgtttgtagacagccctgttgttgaaatcatggctttattcattttatttattttttaaacttgcctgaatttgttctaaaggaatatttaagagacataattttcttctctttaccataacattacacaaaactttttcctaaaacacggttgtgaggtactgatgaggtgtaagtggagctgttaaaaacagcagtgctgtattgcagttatgtatattcgtgtacagtatgtttagatcccaggtaaacatattcttttctgagaggataaatacctgcattcagatattccaggtaaatataattgagtcagggagtagtaaatctgatggagaattcactttggggaggggaaaaagaatagtatgcaagacccttattggcttttaattatacctgaaaccaaaatggatatttttagtctctctgcatgtgagatttggtgtaacaagatagaactataatatatacagtatatggaaggatagatatagtgctttgttcattttaattgcaaagctgccaaaatagttgaagcttaattacttgacttgccttgatttataggactggggcttggagaaaatgagcagatgttcctctaagacatcgattacagaagccttatatacatggatttgattttgtatttgtagctgaaagtcactgttgtctaaaactaacttttctaagttatcaaaacaacctaatttcttttccaacaaggagaacttaatggcatgaaggattgtgtgacacattggaaaagccagcttactgccactctcttcctttggccattagagggaggtgttgcctttcattgacgcttagaagcaaattgttcacttgttaagaaaagtaaatccttaaaaaaagaaaaggaaaaaatttaaccaatttttcttaatacccagaaggaattatactcaatatttccctagttaagaaaagaggagataatgttcgtctaaaaaactccaacgttgtaattacaactctacattcatttacttacttgacatactgccacaaagtagtttttgagttcattaaaaattccaaaggcattagttgttttttttttttttagtgttttgttttttagttaacttttatagacattttagtaacttgctaaagattcaggggattctatgaaaccccgaatttagaaacatctggtctacctcagttaaatgttgactgcttagaaatatagctgaagtgatcaccacagccataaaattgtttaagaaagatttatataatgtttacaaatctggaatcaaggattttagctgaaatcctttaagagatattagagcaagtatttaattcaggtattttcaagttttaaaacttaacctgtttacctactaaaaataaaatagctagtttttttctgcatataaaagttcattgaaatgatatgcccttatttgcaatacttttcccataaagttttaagtgtgaaagaattgtaatttactagatatgtttggtatgggatattttgttaggcaagttttcttttttcttcttaaattgcaataggcttccaaaaagagtataattgtttcagaacaaattaactcttggcattatacgtctccctttttctttacagtattagtaaaaagaaaaattgtacactttctgattttaacttcactaatgtaattactctctcaagaagcttttaaaatttaaattaccatcacacaaccttttttatagtaaagccaacatttgttctctcaccaaaccccatgccaaattcatcatgaagaaagctcagcataagtaattcaaatactgcttataattttagaggggggtagaatttagtaaatattccagccggtcgttttatgcacaaggcttcagtcagaacatagaaaaaaaaaacattctgtgaatgaaatattgtatgttcagattttataaaagacatttttaaaagcccaatttacagccgtatattttcttatgatgtaatttatgaaaaagatgtctgtactaacaggtgctgtaacactactgttgttggattttattgtttggtgataaatgtatacaatatttctaagggaaactatgtactgtgatgtaaaagtctgggcaaaatgtatataatcctgtatataattatgtatttgattataattactgattgtaaagatttaataaaatatgtaaatattccagttt

SEQ ID NO: 355 - DNA, 304 bp, Homo sapiens
gcacccatggattcaaccaactgtggataggaaatattcaagaagaaaaaagcatctgtattgaacatacagagattttttttcttgtcattattctccaaacaatacagtataccaatgatttgcataacatttacgttgtattaggtattataaagtaatcaagagatgatttaaagtacatgggaggatgtgtgtcagttatatgcaaatactgtgtcattttacataagggacttgagcatccaaaatccttatctctctttcataacgtgtcacagttgagttttctatttattttccg

SEQ ID NO: 356 - DNA, 2144 bp, Homo sapiens
ggaatgggccactgattcatttcgtggttaactggaatactgctttttaattgatacccagctgtatctaaatcattacaatactggacagatagtgtagtgcagtgtatttgaaatgcagtgctttgtttggcaaagatttatttaatggtttcattttctctgcaagaagaaaaaaagcagatcatcgaagctcttattatttgcactgtggcagattcacttgagttcagaagcctagggaaaaggtgggacttttgaaactagggcagtaggtaaatgtggacacaccttcgtttgtatttgattagggatctgacagcgtgcatatgtgtacaggtttgcacgtgtgcatacacacatatacaaatcatagaaaaccataggtgttctgtgagagagaaaattttgctacttaaatacagcgtgaattctcatcctgatagttgcagaaaatatttcttttaaaatggagattaatgtctaattccatataaagaagattataggaaaggtgatttaaactgtaagtagctttgttcaccaaaacgctagatttatttgaaacagtgttttatttcttttggaaggcagacaactagtttaatagtgtacatatgaaacgctaatttggcttgttaattggatgcaattaaattgaggttattttatactgcttaattgttagaaaattacatgcgttgccatgcctgtgtaatgtgaagcaaaagcgaagggtatagcaggagtgggggtgggagggacgcaagatctagtcctgtctttgcaattaactttctgtgaaaacttggaaacaagtcatcgaagctctttggacctcatttggaaatggaagagattggaacagatggctcctaaagcttcttccagctcatattctatcagtttataaattctactttgtagttgtagagaatgcaatgtcattatattctgtaattatggtattacaaggatgaactaaacacttaaaaaaatcagcacagtgccaatttagcaaatccgttagaaggaaggcaatttaggcttaaagagcactcacctgtgccaggctccatcccaggctctctctccacattacgtcacttagccctcacaaccaacctgagaagatttagttttttatcttgatgtgtatacttaaagaaacttccattcggaaaggtttttgtggggatgctttgctagtcattggtgaagcaggattccaactcagggttctttggctccgaaaatgctttgtctttttaccatttcacgcagtataagcaattgtttacacatcaaaattatttcaaatatttaaaaaaggccaaccatatttatcacttagcacaatgtttccccttagtagtatatggataaacaggtagcccacgggattaagaacctcgatttgaagtcagacagaatagggcaaattccagctccaccaccacctgggggaatttgggtatgttacttaacctccctgaggttacaaaatgaggataatacccattcaagagtcattgggaaatttttatgagaatgtttgtacccatctcaatgagcacatagtaaacgtttaatacctggtagctatgggttattattaacaaggtattagactataagaaaaacataggacaattcaaattgttgtgacagtaaaatattaaatattttcaaatggtccattaaactcttgactgaaatggtttaagaaacaatgttagaatgacatggtttcacatttaacagttaacaaatggaaatatcaattaaaatctggggtgtttctcactgagctcagccagtgctatgccaatgaagtgaactaaattctctggttctttgtggaaaatcattctgaagtttttgctctaaaaatagcttttggggcctgaattaccccttaccccactcgaacttctgtgcaagagccagaggaccagtgattactcgtggggccttgggcctacttaagagactcaacttgggtgttcacaggactgttgactttaattctaaaaaaatttattaattcaacagagatttattaagcacctgctctgggaaagggctgttctagacactggagatccatcaatagacaaaaatagtaaaaaaaaaaaaaaaaa

SEQ ID NO: 357 - DNA, 2144 bp, Homo sapiens; identical to SEQ ID NO: 356

SEQ ID NO: 358 - DNA, 517 bp, Homo sapiens
aactttattaaaacttacaattgggagtagagtataaatggaagcaggattttttccaactggaaagattagagggttcttatgagaggaggtgattcttttttttactgaggatcttgaatgttaagtagaatttcactgagtaaagaagggagtcaggagctcctcatactctgacctgggatgggaggggacagggatagtaccagggcagaggaagagttgggagcctggaaaggtacgtagctccagatcttgtggtgcctcaaagacctgcagagaaagctggacatcactgaaggtttttgagcagagaggtgatgctataaagtgtgtgtttcagaaagcttatgagggtatatgggatgaatatctcggtggcaaggagacagttagattgccaaaatatcctaaagagaagtaatgaaagttgcccctactgaatgataatatgaattcttttactctgttaattgatgtgtttaaaagtaccctaaaagtaagtaacaaaagtgat

SEQ ID NO: 359 - DNA, 517 bp, Homo sapiens; identical to SEQ ID NO: 358

SEQ ID NO: 360 - DNA, 3207 bp, Homo sapiens
aaaaaaactacactcagcccagcacattgatcaagtatctatctctgagcagttggccttgccagggagagcagagatgtggcaggctccttcagctggagacagggagcttctcagagaagtgagcagagactccacagacaccctaaaaaggcttctactcaagaagtaaagccactactcctgcctttttgcttagtggacaggaaggcacaggagtttgtctgggacatcatagaaattcttaggtttaacttaattctggtcattgtcttctttatttcctgtttttcttccctttgtcagtcttcgcatccaagatttcttccctccctcttgtgggccagcctgtcctgttccagagctagcctgttcctgggtagccttccttagcctccattcagcctcaggtcttttgccttcttccgtgtttatttagagagcagaatctaataacgggttccactgtagccactatccatggacttctgggtcctcttcaggtttgagtgcttgaaaatgttcattctctgggcttgtggcctgtctcctccactctcctcctcaccctctcgctccttcctgtgtgagggccgctctgcagtaatgttctcaggcaagccttcctaggcacctcagaaactactttgccagagccagtaagaatatataatattggagcagttgccaggatagaaattaaatatagattccagtttaggatagagtttttaccgagagctcttcagacagtatacctgtgtcttctctggcaattgctttcattttagtcctatataaaagctttccttttctgtttttttttaaaactatgcttttgcttgcctaaatcttttgatcttatatttctctcatctcagagcctgtcctgagttgtaaggtatttcatactgccttacttaaaagttttttaaactactagagtcatttgatacacacagaagttacctaataatccaaagatgtccatcaagggaggaagggtgggtcatcagactttgcctttgatgttgtagactaggctcctgagttaagcagcagagggacagcagtgccatgtgccttcactgtgtcccaggaaatctgggttggttccagtgggaaataccagtatttcttggttctggaaagtagcaaaagagtaggagatggggaaatagggatggggagagcaagccccgcatgtccatggcgagtcaggtggggagcacgggtggaagggccggctgttgacagacagactaagctgtgtggtgctcttgccgccccttcctgggtacagagcttgagaaaaatgcagccgaccactccctgtgtttgtacagagcaaagcccaaaagccaacctcagatctcctgatttggcagctgaagaaatcagcagagtcctgattgcctgattcagtcccaaaaatgaatgtcaggccccgccccctccccaccaacattgcctctcctacattctccttctgcccctaaatcagacaggaggccagagaggagtattgctcaatgcgtgctatgtgcaactcctcaggccttgtgccacctccatgctgagcccctgaagcagggtgtcctgggtgcctgtgtgtcagctccctcctctctacctacctctgaccttcttgtgggtgagggtggccatgcttatggccatcttaaaactggagaggcagagaactacttatgagtctgtagaccacgtgttgtcttccatggcctgtttctcctgctgtctgggtgagtgagcctgcaacgcaatgcccatgagagtaaatgcctcctgacctaccctgctcagcactgttctagtgtcttggccttgaaagaaaagcctgacttcctgctgacacatgtggtaggggcatggcagctatgaggcacctcctacgtctgttttctggctgtggtgacttgggatttttaaccttatatatctttttcctttactcaaaacaaaacaatttttagcacactgaaaaaaaaaaaaagccaaatgttttgtgcctttctaaggcagcactgtatcccaggctgcattttaggacttaatatggaaataccagagtctgagctcctctaccttgagtttcattagtccttagtgtctaggagacaggaaagaatgctctctgtgactggagaggtgacatgcaggtgcagtgtgtctggagtccctttcccctgctgtgagacttcagtggaggagagaagcattgtaccctgggatcatttggttggttccaatcacaagcttagttatcaggttgcatgccttgtctcctgcaaaagacagaatgtttcacaattcccaggtaaactctggaccattccaagtgtcctagccttctgatgacattaattacctagttgtgtggaggagtataggatggactcctgagaaggggaggttggtggctttgtcttttctttttgctggatcctgaactggtctagacctcctgcccccaccccccagcccccatcagatgtggctggcctttcatttgaaggcttcagacttaaagcattaagcagctagtgccctctgcagggcctggtttccccagggaagggcagcaaggaacatgggaccagaagcctgtcctcagtaatgtgactatagtgagctttagcaaaagtttttctatataatgacatcttacttatcttttaccctttcctcagttttcccctgcctttaactaataaagaattgggagacagaaattttaaagtcctccttattcaagattttgaaattcttagcctgggagtgctggagagaacctggtgctttctccagaatgaagagtcccaatttgtatatcagtgttaagaagaaaacaaaacaaacacataggtgagattttcgtggactattttaaaaatgtgtcattaatataaaaaatttatattagcagtatttaatcattctcacctgtaaagaataagaaaaacagaaggtaaatattcttacagagaatagcagagctttaagattcattttcattttaagtccattttattttgccagtgtattaatgtttagaagtctgttttactaatgttatttattaattttttttcatttccatacacagttagttaactaaagagctttttcaagcacccatgtctgtaaaaaaatatttttaaataaagtttcttttgttgtagcaga

SEQ ID NO: 361 - DNA, 3206 bp, Homo sapiens
aaaaaaactacactcagcccagcacattgatcaagtatctatctctgagcagttggccttgccagggagagcagagatgtggcaggctccttcagctggagacagggagcttctcagagaagtgagcagagactccacagacaccctaaaaaggcttctactcaagaagtaaagccactactcctgcctttttgcttagtggacaggaaggcacaggagtttgtctgggacatcatagaaattcttaggtttaacttaattctggtcattgtcttctttatttcctgtttttcttccctttgtcagtcttcgcatccaagatttcttccctccctcttgtgggccagcctgtcctgttccagagctagcctgttcctgggtagccttccttagcctccattcagcctcaggtcttttgccttcttccgtgtttatttagagagcagaatctaataacgggttccactgtagccactatccatggacttctgggtcctcttcaggtttgagtgcttgaaaatgttcattctctgggcttgtggcctgtctcctccactctcctcctcaccctctcgctccttcctgtgtgagggccgctctgcagtaatgttctcaggcaagccttcctaggcacctcagaaactactttgccagagccagtaagaatatataatattggagcagttgccaggatagaaattaaatatagattccagtttaggatagagtttttaccgagagctcttcagacagtatacctgtgtcttctctggcaattgctttcattttagtcctatataaaagctttccttttctgtttttttttaaaactatgcttttgcttgcctaaatcttttgatcttatatttctctcatctcagagcctgtcctgagttgtaaggtatttcatactgccttacttaaaagttttttaaactactagagtcatttgatacacacagaagttacctaataatccaaagatgtccatcaagggaggaagggtgggtcatcagactttgcctttgatgttgtagactaggctcctgagttaagcagcagagggacagcagtgccatgtgccttcactgtgtcccaggaaatctgggttggttccagtgggaaataccagtatttcttggttctggaaagtagcaaaagagtaggagatggggaaatagggatggggagagcaagccccgcatgtccatggcgagtcaggtggggagcacgggtggaagggccggctgttgacagacagactaagctgtgtggtgctcttgccgccccttcctgggtacagagcttgagaaaaatgcagccgaccactccctgtgtttgtacagagcaaagcccaaaagccaacctcagatctcctgatttggcagctgaagaaatcagcagagtcctgattgcctgattcagtcccaaaaatgaatgtcaggccccgccccctccccaccaacattgcctctcctacattctccttctgcccctaaatcagacaggaggccagagaggagtattgctcaatgcgtgctatgtgcaactcctcaggccttgtgccacctccatgctgagccctgaagcagggtgtcctgggtgcctgtgtgtcagctccctcctctctacctacctctgaccttcttgtgggtgagggtggccatgcttatggccatcttaaaactggagaggcagagaactacttatgagtctgtagaccacgtgttgtcttccatggcctgtttctcctgctgtctgggtgagtgagcctgcaacgcaatgcccatgagagtaaatgcctcctgacctaccctgctcagcactgttctagtgtcttggccttgaaagaaaagcctgacttcctgctgacacatgtggtaggggcatggcagctatgaggcacctcctacgtctgttttctggctgtggtgacttgggatttttaaccttatatatctttttcctttactcaaaacaaaacaatttttagcacactgaaaaaaaaaaaaagccaaatgttttgtgcctttctaaggcagcactgtatcccaggctgcattttaggacttaatatggaaataccagagtctgagctcctctaccttgagtttcattagtccttagtgtctaggagacaggaaagaatgctctctgtgactggagaggtgacatgcaggtgcagtgtgtctggagtccctttcccctgctgtgagacttcagtggaggagagaagcattgtaccctgggatcatttggttggttccaatcacaagcttagttatcaggttgcatgccttgtctcctgcaaaagacagaatgtttcacaattcccaggtaaactctggaccattccaagtgtcctagccttctgatgacattaattacctagttgtgtggaggagtataggatggactcctgagaaggggaggttggtggctttgtcttttctttttgctggatcctgaactggtctagacctcctgcccccaccccccagcccccatcagatgtggctggcctttcatttgaaggcttcagacttaaagcattaagcagctagtgccctctgcagggcctggtttccccagggaagggcagcaaggaacatgggaccagaagcctgtcctcagtaatgtgactatagtgagctttagcaaaagtttttctatataatgacatcttacttatcttttaccctttcctcagttttcccctgcctttaactaataaagaattgggagacagaaattttaaagtcctccttattcaagattttgaaattcttagcctgggagtgctggagagaacctggtgctttctccagaatgaagagtcccaatttgtatatcagtgttaagaagaaaacaaaacaaacacataggtgagattttcgtggactattttaaaaatgtgtcattaatataaaaaatttatattagcagtatttaatcattctcacctgtaaagaataagaaaaacagaaggtaaatattcttacagagaatagcagagctttaagattcattttcattttaagtccattttattttgccagtgtattaatgtttagaagtctgttttactaatgttatttattaattttttttcatttccatacacagttagttaactaaagagctttttcaagcacccatgtctgtaaaaaaatatttttaaataaagtttcttttgttgtagcaga

SEQ ID NO: 362 - DNA, 3207 bp, Homo sapiens
aaaaaaactacactcagcccagcacattgatcaagtatctatctctgagcagttggccttgccagggagagcagagatgtggcaggctccttcagctggagacagggagcttctcagagaagtgagcagagactccacagacaccctaaaaaggcttctactcaagaagtaaagccactactcctgcctttttgcttagtggacaggaaggcacaggagtttgtctgggacatcatagaaattcttaggtttaacttaattctggtcattgtcttctttatttcctgtttttcttccctttgtcagtcttcgcatccaagatttcttccctccctcttgtgggccagcctgtcctgttccagagctagcctgttcctgggtagccttccttagcctccattcagcctcaggtcttttgccttcttccgtgtttatttagagagcagaatctaataacgggttccactgtagccactatccatggacttctgggtcctcttcaggtttgagtgcttgaaaatgttcattctctgggcttgtggcctgtctcctccactctcctcctcaccctctcgctccttcctgtgtgagggccgctctgcagtaatgttctcaggcaagccttcctaggcacctcagaaactactttgccagagccagtaagaatatataatattggagcagttgccaggatagaaattaaatatagattccagtttaggatagagtttttaccgagagctcttcagacagtatacctgtgtcttctctggcaattgctttcattttagtcctatataaaagctttccttttctgtttttttttaaaactatgcttttgcttgcctaaatcttttgatcttatatttctctcatctcagagcctgtcctgagttgtaaggtatttcatactgccttacttaaaagttttttaaactactagagtcatttgatacacacagaagttacctaataatccaaagatgtccatcaagggaggaagggtgggtcatcagactttgcctttgatgttgtagactaggctcctgagttaagcagcagagggacagcagtgccatgtgccttcactgtgtcccaggaaatctgggttggttccagtgggaaataccagtatttcttggttctggaaagtagcaaaagagtaggagatggggaaatagggatggggagagcaagccccgcatgtccatggcgagtcaggtggggagcacgggtggaagggccggctgttgacagacagactaagctgtgtggtgctcttgccgccccttcctgggtacagagcttgagaaaaatgcagccgaccactccctgtgtttgtacagagcaaagcccaaaagccaacctcagatctcctgatttggcagctgaagaaatcagcagagtcctgattgcctgattcagtcccaaaaatgaatgtcaggccccgccccctccccaccaacattgcctctcctacattctccttctgcccctaaatcagacaggaggccagagaggagtattgctcaatgcgtgctatgtgcaactcctcaggccttgtgccacctccatgctgagccctgaagcagggtgtcctgggtgcctgtgtgtcagctccctcctctctacctacctctgaccttcttgtgggtgagggtggccctcgcttatggccatcttaaaactggagaggcagagaactacttatgagtctgtagaacacgtgttgtcttccatggcctgtttctcctgctgtctgggtgagtgagcctgcaacgcaatgcccatgagagtaaatgcctcctgacctaccctggtcagcactgttctagtgtcttggccttgaaagaaaagcctgacttcctgctgacacatgtggtaggggcatggcagctatgaggcacctcctacgtctgttttctggctgtggtgacttgggatttttaaccttatatatctttttcctttactcaaaacaaaacaatttttagcacactgaaaaaaaaaaaaagccaaatgttttgtgcctttctaaggcagcactgtatcccaggctgcattttaggacttaatatggaaataccagagtctgagctcctctaccttgagtttcattagtccttagtgtctaggagacaggaaagaatgctctctgtgactggagaggtgacatgcaggtgcagtgtgtctggagtccctttcccctgctgtgagacttcagtggaggagagaagcattgtaccctgggatcatttggttggttccaatcacaagcttagttatcaggttgcatgccttgtctcctgcaaaagacagaatgtttcacaattcccaggtaaactctggaccattccaagtgtcctagccttctgatgacattaattacctagttgtgtggaggagtataggatggactcctgagaaggggaggttggtggctttgtcttttctttttgctggatcctgaactggtctagacctcctgcccccaccccccagcccccatcagatgtggctggcctttcatttgaaggcttcagacttaaagcattaagcagctagtgccctctgcagggcctggtttccccagggaagggcagcaaggaacatgggaccagaagcctgtcctcagtaatgtgactatagtgagctttagcaaaagtttttctatataatgacatcttacttatcttttaccctttcctcagttttcccctgcctttaactaataaagaattgggagacagaaattttaaagtcctccttattcaagattttgaaattcttagcctgggagtgctggagagaacctggtgctttctccagaatgaagagtcccaatttgtatatcagtgttaagaagaaaacaaaacaaacacataggtgagattttcgtggactattttaaaaatgtgtcattaatataaaaaatttatattagcagtatttaatcattctcacctgtaaagaataagaaaaacagaaggtaaatattcttacagagaatagcagagctttaagattcattttcattttaagtccattttattttgccagtgtattaatgtttagaagtctgttttactaatgttatttattaattttttttcatttccatacacagttagttaactaaagagctttttcaagcacccatgtctgtaaaaaaatatttttaaataaagtttcttttgttgtagcaga

SEQ ID NO: 363 - DNA, 863 bp, Homo sapiens
aactccatcagtcccctaattgtcagcctttacctccctcccagagcaaggagtttagggattctaaagcttagtgtccacacatcattctaccagaccttagagctttagaagctcaatctaaaatactgtaactcagcataaactattactatcactcctttgaactcagtctccatgagcagtgttttgttggaaatacatagaacggcttaatgcctagagggtggtggatagtgaaggacggtcaaggttatatttttgactgcttagggattctttggatacaagaaacagaaatgttcaagcggaataaaggagggagtggagttgtggtaaggatgcagggtatttcgcagaacccaggacgggaagtgcctttggttcttgggtggagctggaactgcagagctttgcacctagtcctttctcccgcttcacagtctgcttatggtatatgtggcccccaaataggcactctagtcctcaagtctacaccaccttccaactctggggatcaccatgaacaaattctcaatttcccatacttaattttttttttttttgagatggagtctcgctgtgtcgcccaggctggagtgcagtggtgcagtctcaactcaccacaacctccgcctcccaggttcaagcagttctctgcctcaacctcccgagtagctgggattacaggcgcctgccaccatgcccagctaatgttcatatttttagtagagacagggtttcaccgtcttggctaggctggtcttgaactcctgaccctcatgatccacccacctcggcctcccaaagtgctaagattacaggcgtgagccaccgcgcccggcccatacttcgtattctta

SEQ ID NO: 364 - DNA, 4428 bp, Homo sapiens
caatgtatgatttctgggacaattaagctttatttttcatatatatatatattttcatatatatatatacatacatatataaaggaaacaatttgcaaatttacacacctgacaaaaccatatatacacacatatgtatgcatacacacagacagacacacacacccgaagctctagccaggcccgttttccatccctaagtaccattctctcatttgggcccttctagggttggggccctgagcttggtttgtagaagtttggtgctaatataaccatagctttaatccccatgaaggacagtgtagacctcatctttgtctgctccccgctgcctttcagttttacgtgatccatcaagagggctatgggagccaagtgaacacggcggattgaggctaattcacctgaactcaaaaacagtgcccagcttcctcaccgcaggcacgcatcttttctttttttttcctcgagacggagtctcgctgtgttgcccaggctggagtgcagtggcacggtctcggctcactgcaagctccacctcctggattcataccattctcctgcttcagccttccgagtagctagggactataggtgccaaccactacgcctagctaattatatattgtatattagtagagacagggtttcaccgtgttagccaggatggtctcgtcctgactattgtgatccgcccgcctcggcctcccaaagtgctgggataacaggcgtagagccaccacacctggccccggcacgtatctttcaaggaatagacaccagttcctggcttctgaccaaagaaaaaatgtcacaggagactttgaagaggcagacaggagggtggtggcagcaacactgcagctgcttctggatgctgctggggtgctctccggagcgggtgtgaacagcgcacttcaacatgagcaggcgcctggctccggtgtgtcctcacttcagtggtgcacctggatggtggaagccagcctttggggcaggaaaccagctcagagaggctacccagctcagctgctggcaggagccaggtatttacagccataatgtgtgtaagaaaaaacacgttcttacaagaaactctcctacccgctcgggagactggggctccttgcttgggatgagcttcactcaacgtggagatggtggtggactggtccctgaaaagcgggccttgcaggccaaagtgaggtcctcaggtcctaacccagtggccctctgaaagggggtgtgcaggcgaggggagcaggaggcttctctctagtccctttggaggctttggctgagagaagagtgagcagggagctgggaatggtccaggcagggaagggagctgaagtgattcggggctaatgcctcagatcgatgtatttctctccctaaaagtgggtagaggagaagaggggaacacggagacggtgctgagttgaaggtgtgagcaccgagaggaaggagagatggaagcagaagccgatgaatttggtgggcagcgttggggaggaagctaggatgggcatggcaggccagggaaggagggcggcccccgtctgactgcactggtgaaatggccacacccagagccacgggcattggtcaggaaaaggtgatgggacagggtctttctcagtcttcctccaagctccctcagccacttgcttggccctgccatctgtgagtagtgttaagaaggcaagatggggcctgctccctatctctgacaaagagggatgaaggatagagagaaccgttagtccctactgcccccggtccctgaggatgtggcaggctctggccacaggaaccgcctcctacctggtctcccggagccctcttgtcaccgctgctgccctgcaggaggcccatctcttctgggagcttatctgacttaacttcaactacaagttcgctcttacgagacgggggcagcgtgctgggaggagggagggaggtgagaggttggtatctcagggccacaggaagagaagggcccgctgtgaaggatgtggaatggatgagggctccttgctccagggccagcccagggcagggaagcaggtcatgagaccatgtggctgatggaagctgggcagtgggtagtggagcaggcagcaccctgacccagggccccactcctgctgtcaaggggcaggcgggcgctgggcaggcagcaggctgggtggcaaaacgggcgggggcggaggggccggtgttgggcttacatctcctgcttccctgagcgcctgcacggcagcttgcccttcttatagaggaaatagaggacagcgcccagcaccgccaggaccaggatgcacacaatcacagccacgatgaccacgcccccggctctccggctccggcagctttctctctgcgccacaaagacactcctcgtcactccctgccccaggccacttcgtcaccatcgttgccccagccagtccagggccgacaagatggggctgctactcacctttctggacagggctctctggggagggacagggcagaaaggatgccctggcacagccctgttctcttgccaggcctggcttacctgtggaggtgctgttggctctggtatgaggactggcagtggaagtgctgaggccagtggttgtgttggagtctggtgtgagggtggttaaattgactaggaggcagagggaggggtgttaggagaagcgcaagttactgcccgtgcctgggcctgcccctgccatcccctgcagggatgcagccctcacccagctccaggaagaggatgctggtgtttttgcccaggtcgttggaggccgtgcattcaacacctgtctccaacagctccggggtcacgaggacattcagggtgctcaggactcgctgtggatcttggtcttgttcacttgcctgcgaggaaaggaaggaggcagctcaggggatggggaggatctctggtcctggccacaaagcgcaggcagggattaggagagtgtggcagatgagacacccgctcaccgtgccgttgacgttccaggagatggtgggccgggggtgccctgacgcttcacaagacagattcaacaccatattctctttcacccacaccttcctctccttgaatgccatccaaggggggccttggggaggtagggagaggtgaggtggcaagcccagctagcctgcctccccctccgcaccagagctccccagggcagcaggtggctttttgtcaaagagcttaaaaaccaccccacttggggtgacctggtctctaccccagagggagggcctcaccaaaaatggccacgttgaccagctgtgtgcggttcaggccgggtatgctgggcacagacgccacgcagcgatagccgcctcctgcctcccgtttcaggtcatgcaactgaagcacaggccccctttccagcacctggcctgtctgggatgagagatgggtcagagggtctgggaaagagcacattcttgtcacccgccagccccacccaccccatcagccccttgccccagacccgcctgggtacctcttctctcagcctctggaactcgagctcctggctactctctgctcacaggtcaggtgaggctgctgccttcctgtctctcaggggctgcgggactcactcggacgtcagacacatctgggggtacagcaatcatgtcacccagggcagggtggggccagttccctattgccccagcctggtccccctgtcctgggtccccagcccctcacagttcaccagtagttcctgtggttcactcagcagcgatatcatggtgtccaagtccaggccctgacattcatagcgcccactgtgttccttccgggcaggctccagcaccaggaccccgttgtcgttggttgtctcttcctctgcctccctggtgctggggttctagggaggattggggaggtgagcagagtgcacctcccgccactccacctgggtctctgcttgcatccccacctgcacccagcacaaagcccccacacctgcttgctgatgctgaagtgtggtggagggttgccatcagccaaacacctgatttccacgcggtccccttccttcagcattcccacgggctccacttccagccacactttttctgtcgggtctgcataggcaaagggggtagctcttggcccatgagtcaacctgggctgataagggggagccagcaggagtttccagcagccccagccccagtaagcagagagtcaggttagtactcacagaaaacagggacggtgacttccctggactccttcatgtggttcccactgggcagccggtagttgagctcacagtaaaactgggcatctttgtcttctttaaccagctgtgccttcagaatactctgcaaggtgtacaaaccactcgactccacagtctgggacgactgaatgtggac

SEQ ID NO: 365 - DNA, 863 bp, Homo sapiens; identical to SEQ ID NO: 363

SEQ ID NO: 366 - DNA, 3439 bp, Homo sapiens
caatgtatgatttctgggacaattaagctttatttttcatatatatatatattttcatatatatatatacatacatatataaaggaaacaatttgcaaatttacacacctgacaaaaccatatatacacacatatgtatgcatacacacagacagacacacacacccgaagctctagccaggcccgttttccatccctaagtaccattctctcatttgggcccttctagggttggggccctgagcttggtttgtagaagtttggtgctaatataaccatagctttaatccccatgaaggacagtgtagacctcatctttgtctgctccccgctgcctttcagttttacgtgatccatcaagagggctatgggagccaagtgaacacggcggattgaggctaattcacctgaactcaaaaacagtgcccagcttcctcaccgcaggcacgcatcttttctttttttttcctcgagacggagtctcgctgtgttgcccaggctggagtgcagtggcacggtctcggctcactgcaagctccacctcctggattcataccattctcctgcttcagccttccgagtagctgggactataggtgccaaccactacgcctagctaatttttttttgtatttttagtagagacagggtttcaccgtgttagccaggatggtctcgtcctgactttgtgatccgcccgcctcggcctcccaaagtgctgggattacaggcgtgagccaccacacctggccccggcacgtatcttttaaggaatgacaccagttcctggcttctgaccaaagaaaaaatgtcacaggagactttgaagaggcagacaggagggtggtggcagcaacactgcagctgcttctggatgctgctggggtgctctccggagcgggtgtgaacagcgcacttcaacatgagcaggcgcctggctccggtgtgtcctcacttcagtggtgcacctggatggtggaagccagcctttggggcaggaaaccagctcagagaggctacccagctcagctgctggcaggagccaggtatttacagccataatgtgtgtaaagaaaaaacacgttctacaagaaactctcctacccgctcgggagactggggctccttgcttgggatgagcttcactcaacgtggagatggtggtggactggtacctgaaaagcgggccttgcagggccaagtgaggtcctcaggtcctaacccagtggccctctgaaagggggtgtgcaggcgaggggagcaggaggcttctctctagtccctttggaggctttggctgagagaagagtgagcagggagctgggaatggtccaggcaggaagggagctgaagtgattcggggctaatgcctcagatcgatgtatttctctccctaaaagtgggtagaggagaagaggggaacacggagacggtgctgagttgaaggtgtgagcaccgagaggaaggagagatggaagcagaagccgatgaatttggtgggcagcgttggggaggaagctaggatgggcatggcaggccagggaaggagggcggcccccgtctgactgcactggtgaaatggccacacccagagccacgggcattggtcaggaaaaggtgatgggacagggtctttctcagtcttcctccaagctccctcagccacttgcttggccctgccatctgtgagtagtgttaagaaggcaagatggggcctgctccctatctctgacaaagagggatgaaggatagagagaaccgttagtccctactgcccccggtccctgaggatgtggcaggctctggccacaggaaccgcctcctacctggtctcccggagccctcttgtcaccgctgctgccctgcaggaggcccatctcttctgggagcttatctgacttaacttcaactacaagttcgctcttacgagacgggggcagcgtgctgggaggagggagggaggtgagaggttggtatctcagggccacaggaagagaagggcccgctgtgaaggatgtggaatggatgagggctccttgctccagggccagcccagggcagggaagcaggtcatgagaccatgtggctgatggaagctgggcagtgggtagtggagcaggcagcaccctgacccagggccccactcctgctgtcaaggggcaggcgggcgctgggcaggcagcaggctgggtggcaaaacgggcgggggcggaggggccggtgttgggcttacatctcctgcttccctgagcgcctgcacggcagcttgcccttcttatagaggaaatagaggacagcgcccagcaccgccaggaccaggatgcacacaatcacagccacgatgaccacgccccggctctccggctccggcagctttctctctgcgccacaaagacactcctcgtcactccctgccccaggccacttcgtcaccatcgttgccccagccagtccagggccgacaagatggggctgctactcacctttctggacagggctctctggggagggacagggcagaaaggatgccctggcacagccctgttctcttgccaggcctggcttacctgtggaggtgctgttggctctggtatgaggactggcagtggaagtgctgaggccagtggttgtgttggagtctggtgtgagggtggttaaattgactaggaggcagagggaggggtgttaggagaagcgcaagttactgcccgtgcctgggcctgcccctgccatcccctgcagggatgcagccctcacccagctccaggaagaggatgctggtgtttttgcccaggtcgttggaggccgtgcattcaacacctgtctccaacagctccggggtcacgaggacattcagggtgctcaggactcgctgtggatcttggtcttgttcacttgcctgcgaggaaaggaaggaggcagctcaggggatggggaggatctctggtcctggccacaaagcgcaggcagggattaggagagtgtggcagatgagacacccgctcaccgtgccgttgacgttccaggagatggtgggccgggggtgccctgacgcttcacaagacagattcaacaccatattctctttcacccacaccttcctctccttgaatgccatccaaggggggccttggggaggtagggagaggtgaggtggcaagcccagctagcctgcctccccctccgcaccagagctccccagggcagcaggtggctttttgtcaaagagcttaaaaaccaccccacttggggtgacctggtctctacccagagggagggcctcaccaaaaatggccacgttgaccagctgtgtgcggttcaggccgggtatgctgggcacagacgccacgcagcgatagccgcctcctgcctcccgtttcaggtcatgcaactgaagcacaggccccctttccagcacctggcctgtctgggatgagag

SEQ ID NO: 367 - DNA, 2668 bp, Homo sapiens
caatgtatgatttctgggacaattaagctttatttttcatatatatatatattttcatatatatatatacatacatatataaaggaaacaatttgcaaatttacacacctgacaaaaccatatatacacacatatgtatgcatacacacagacagacacacacacccgaagctctagccaggcccgttttccatccctaagtaccattctctcatttgggcccttctagggttggggccctgagcttggtttgtagaagtttggtgctaatataaccatagctttaatccccatgaaggacagtgtagacctcatctttgtctgctccccgctgcctttcagttttacgtgatccatcaagagggctatgggagccaagtgaacacggcggattgaggctaattcacctgaactcaaaaacagtgcccagcttcctcaccgcaggcacgcatcttttctttttttttcctcgagacggagtctcgctgtgttgcccaggctggagtgcagtggcacggtctcggctcactgcaagctccacctcctggattcataccattctcctgcttcagccttccgagtagctgggactataggtgccaaccactacgcctagctaatttttttttgtatttttagtagagacagggtttcaccgtgttagccaggatggtctcgtcctgactttgtgatccgcccgcctcggcctcccaaagtgctgggattacaggcgtgagccaccacacctggccccggcacgtatcttttaaggaatgacaccagttcctggcttctgaccaaagaaaaaatgtcacaggagactttgaagaggcagacaggagggtggtggcagcaacactgcagctgcttctggatgctgctggggtgctctccggagcgggtgtgaacagcgcacttcaacatgagcaggcgcctggctccggtgtgtcctcacttcagtggtgcacctggatggtggaagccagcctttggggcaggaaaccagctcagagaggctacccagctcagctgctggcaggagccaggtatttacagccataatgtgtgtaaagaaaaaacacgttctacaagaaactctcctacccgctcgggagactggggctccttgcttgggatgagcttcactcaacgtggagatggtggtggactggtccctgaaaagcgggccttgcagggccaagtgaggtcctcaggtcctaacccagtggccctctgaaagggggtgtgcaggcgaggggagcaggaggcttctctctagtccctttggaggctttggctgagagaagagtgagcagggagctgggaatggtccaggcagggaagggagctgaagtgattcggggctaatgcctcagatcgatgtatttctctccctaaaagtgggtagaggagaagaggggaacacggagacggtgctgagttgaaggtgtgagcaccgagaggaaggagagatggaagcagaagccgatgaatttggtgggcagcgttggggaggaagctaggatgggcatggcaggccagggaaggagggcggcccccgtctgactgcactggtgaaatggccacacccagagccacgggcattggtcaggaaaaggtgatgggacagggtctttctcagtcttcctccaagctccctcagccacttgcttggccctgccatctgtgagtagtgttaagaaggcaagatggggcctgctccctatctctgacaaagagggatgaaggatagagagaaccgttagtccctactgcccccggtccctgaggatgtggcaggctctggccacaggaaccgcctcctacctggtctcccggagccctcttgtcaccgctgctgccctgcaggaggcccatctcttctgggagcttatctgacttaacttcaactacaagttcgctcttacgagacgggggcagcgtgctgggaggagggagggaggtgagaggttggtatctcagggccacaggaagagaagggcccgctgtgaaggatgtggaatggatgagggctccttgctccagggccagcccagggcagggaagcaggtcatgagaccatgtggctgatggaagctgggcagtgggtagtggagcaggcagcaccctgacccagggccccactcctgctgtcaaggggcaggcgggcgctgggcaggcagcaggctgggtggcaaaacgggcgggggcggaggggccggtgttgggcttacatctcctgcttccctgagcgcctgcacggcagcttgcccttcttatagaggaaatagaggacagcgcccagcaccgccaggaccaggatgcacacaatcacagccacgatgaccacgccccggctctccggctccggcagctttctctctgcgccacaaagacactcctcgtcactccctgccccaggccacttcgtcaccatcgttgccccagccagtccagggccgacaagatggggctgctactcacctttctggacagggctctctggggagggacagggcagaaaggatgccctggcacagccctgttctcttgccaggcctggcttacctgtggaggtgctgttggctctggtatgaggactggcagtggaagtgctgaggccagtggttgtgttggagtctggtgtgagggtggttaaattgactag

SEQ ID NO: 368 - DNA, 863 bp, Homo sapiens; identical to SEQ ID NO: 363

SEQ ID NO: 369 - DNA, 16146 bp, Homo sapiens
gtgtggcgtcacttccggcttccttcagtccgctggtcccgagcacgagctgtgaggggattcacttgtgtgcggaactcctcggaaccatggtgagcctgactcccctgcctattgccctacccctgctccgccgtgctcttgccaccccactgcttcctctgtcctgctagggacgtaggctccgtttttgtctccccggccctccgcacatggtgcgagccatgcgcggggcgtgcggcctgcgccaggccagccggtggagctcaccacgagggggaggggtggaccgcaaagccagcgtctccttgtgcctaggtctttgcatagtcccggcagcccaggtccgcgcctcacccggagcgaagaaatttctagtgtgggacccgctccgccctccttctaggggcggagcctggagcgacggggtctgagccatcagagggtggaggggccgcagccttccgagggtggaagatggaggccgcgttccctcgcccgcccggcaggcgtcaccttgatggcctgcaacccctccctgcctcattcttagttcaagatcgtctttagtctcgctgtacgtaactgtcaatctcgctggtgtataatttatactcccgggggccttgtaaatccgaaaagccatgtcgctctcctacaagtccctctctcccacttaaatgctttctccgatgatggaagcttcatttgattgaaaacattgttgtaaatgagttttctcttagatgtccacttgtaagactagtggaaggcacctcagtgtatgtgttagagtattggtacttaaacggaatgcctcttggttttccttttcaggcgtccctttcccttgcacctgttaacatctttaaggcaggagctgatgaagagagagcagagacagctcgtctggtaagccttgttctaagcattgttttaaagataaaactggaggccaggcgcggtggcttactcctgtaatcccagtactttgggaggccgaggtaggcggatgaactgaggtcaggagttcgagaccagcctggccaacatggtaaaaccccgtttctactagaaatacaaaaattagccgggcgtggtgatgggcacctgtaatcccagctactcgggaggctgaggcaggaggatcgcttgaacccaggaggcggaggttgcagtgagctgagatcgcgccattgcactccagcctgggcgacagagcgacactctgcctcaaaaaaaaaaaaaagtaaataaagataaaactgtacttgaagactgtaaagttgattctgataatctccttggtttttactccagacttcttttattggtgccatcgccattggagacttggtaaagagcaccttgggacccaaaggcatggtaagaaaaatagaaaagttttatattttaatattgttttagagcgcttggtggaaatataataacaagcgtattaaaatgctttttaatctttaaaacgtttaattataaaagacaagtatgttctccttagtaaaaatcagagtccccagaatcaccatccccaatcccatgcccctccccaatgacaagtactgttatcatttgcacgtacatcttctaatattctgtttatgtagaagtatgtgtacttcattatgtattttatactcatgtaacatactgttttataaaacagatactatttatcaatacttttttgtagcttgctcttttaaattcctttcagtgtaagtagataacactgcccctttaactgtcaaatattatcctgtaccttaattattttataatttaattatggctgtattgatagtttctttccattgtttttgcagttacggtgttgaaacaaaaactagtgtctacctgtgcttctagtgtttctaggggtagatacatggtttggttacgtggtgtatgtattgaaaacatttgatgaatggataccacaaaatagctatccagagtgtttatacactagcactgtgtgagaatactgattgatccatgcattcttcaagatgtgcttatgtcttaacttgaaccaattatgttccctttaggacaaaattcttctaagcagtggacgagatgcctctcttatggtaaccaatgatggtgccactattctaaaaaacattggtgttgacaatccagcagctaaagttttagttggtaagtctgaatatactttttcaccaacctaataatactgtttgttaacatttttgaaataactttataaataggctgtgttgaccaatcgtactgtcaattgatgtccactagttgttaattatcgttgttaaaatacaagcttcaggagtgcccgtatgttggtggtaaaactgttgcatttcagacctcagagttccaaataatttgttgaatgaggaaccctggtaagtttagattggtagtgaatatttttggagaatttagtaagcaaagaagcaattttgagttaataactaatttctttttctagatatgtcaagggttcaagatgatgaagttggtgatggcactacctctgttaccgttttagcagcagaattattaagggtaagagcaactaagcaactcttttttcctactgtgtttttgagtatcagaggtaatctagtccttacttcctctgtctttactattgaggagtgcttaataattttctatttataacttttgttttataactttattaataggaagcagaatctttaattgcaaaaaagattcatccacagaccatcatagcgggttggagagaagccacgaaggctgcaagagaggcgctgttgagttctgcagttgatcatgggtttgtatagcaaagtactactgttctaaacatttagtgttctttcataacatgcttaatgcaagaaatctataggacactgaaaagcatacacaaagatcatcttgctgcctcaccccactccaacagtcaaacctacatcagcctccagagatagccactaaagttaagtttgggtttttagtctttttgtatatatcatcaaaatatacaaataaagcaaatagtataatactgtatagagaatttgttagcctctttttaacctagttaaatattaagcacatttttggatgtcaattttctgtgcagtattttaatagagttacacatttgaatatttggctagaatgactgtattaacctatctgtagggggagatttgtgtatttgatgatttttagcattataaaataactttgtgacgttgcgacatagcccaaaggtttctagaagtgtaattgttgggtccaaaggtaagtgtgtgtgttttaaggcacccccaaacctgggctgcacagcaggtgagcagcaggtggaaaaattgtcttcccatgaaaccagtccctggtgccaaaaaggtccgggaccactgttttaaggcacttctatttatttgcccattcacaactgtataataatacttgtttttcacgtccttttatttatttatttattttgagacggagtctcgctcttagagttgcccagaatggagtgcagtggcacgacttcggctgactgcaacctctgcctcccgggttcaagcgattctcttgcctcagcctcccaagtagcagggactacaggcatgtgccatcatagccagctaattttgtatttttagtgtagatggggtttcaccatgttgctcaggctggtcttgaactgacctcaagtgatccatcctcctcagtctcccaaagtgctaggattacaggcgtgagccactgtgcccggccatttctcacattcttgccaacattagacttttgcatgcttgtgtggcccccacccctcttttttttttggcattttgccagtttggtggggaaaataacatctttaatttgtgtttcttgattactgctgaggtttaattcttttcatatagcttacagacttgatcagttagggtaaaattatctattgacatgaatatctagataaattttgaaaagtaaagtagggttaatatgtatatttggttggttttatttagttccgatgaagttaaattccgtcaagatttaatgaatattgcgggcacaacattatcctcaaaacttcttactcatcacaaagaccactttacaaagttagctgtagaagcagttctcagactgaaaggctctggcaacctggaggcaattcatattatcaagaagctaggaggaagtttggcagattcctatttagatgaaggtatgtatgaatgtcagatacaagaagctttgattagatgctgagggctgaatactgagtgaattctgttttgagaccagtgaccctttacaaagccagtgaacttgaatttaaggacatatcatatgtgcaaccatttttgtcattttattgacagtgtactcctcttcccgcgctattccagcattgttgatgatctctagagtttacttaactaccatgaagttatttgcagtctctgataaagaggaaatgttttcttttactagaaatcatctattctcaaatggtacttttaccaggattatatgtattctccaggaagggtctgggtcagtcaaatcattgtgttagctggttgttgaggatgtacagttgaccattgaacaacatgggtttgaattatgtaggttcacaatgcaggttttttcaataaatatagtcagccctttgtgtccgtggtttgcacatgtgcaaccgaacgtggatggaaaatgcagtatttgcaggatttgaaacccatgtatatagtgggccagcttttcaaatctgctggttccagtcagcctggaacttaagtatgtggggattttggtgtatgtgggcgtcttggaaccagtccccttcgtatactgggggatgactagttttttttagaaaagaattaaaaaaaatttctttaacaaataattatgtatgtttatagggcaagaggatctagttcttaaagagtgataaatgagacataataagtactgctttcttagtagtacatttttgtttagagtgaagttttccagatcatcttcacattatatttacttcacaaaatggcctgtcaaaaagtataggcattcttatatagagaaggaaaaaaaaagaattagatggtgctttacaacttctgtttttaccagtggtttggagtcctggttttgttctgtgtcataggtcttgatttattttaagagagagtcataattctgaaaatactcttgattaagtttatatacaagagctgtgtagcatttctttttttttttttttgagacggagtctggctgtgtcacccaggctggagtgcagcagtatgatctcgcctcactgcaaccactgcctcctgagttaaggcgattctcctgcctcagcctcctgagtaggtgggattacaggcgtgtgccaccatgcctggctaacttttttgtatttttagtagagacggggtatcgccatgttgaccaggctggtctcgaactcctgacctaaggggatccacctgcctcagcctcccaaagtactgggattacaggcgtgagccaccatgcctggccgctgcgtagcatttctgataggggctggtggtagggaaggagcattaaaacaagaatattagtagcacaagcagcaccattcttgaatgtctgctctgtactaggaattgtaataggaactttagtcatttagtcatcatgacctggtgagtgaggattaggttcacttgaatagagtagaaaacccaagataatggtggcttcataatggaaaagtttctaatgtaaccaaaaaaaggcctagaaaggtaggtggtactgggtttgtatgatggttccaaagcagcaggactaggctggtaactagcacctctgctactggttacattcctgttttacaaattagcatttctggttggataatttgtcgaaggttatatagccagcagcaggggcatgatcagggtcagatttatctgactccacggtgtccatggtttttccatttttaccaccagcctcaatacctgaatcttcaatttttctcttgtggtggtgattttaagctaataaaaatataggacttaacctattgtctttatattgcaacccatacagatgtgggtgtagcgtatatctgaaacaaaagtttcaaaatactgtttaattttattgtctgtactgtgctcttatattttctgtttcatattttttaagtaacccattaaattgattttgtaataactcttctagtgggatgctttataccagaagtgtccaaggaagagaatacagtcatgggttcctagtttctgtttctggttgggtcggtaaagccccttcctcctccctcttttctgcttatcactagagacagaaactaaaatccatggctttcaggcgctaaaagcctaaaagcaaaacaacaacagaataaggcaggttggacaagcttgcttttatgccttctaagagcttggtaaattggacttaaatagcttctttgaaacagtgatatgataaagcagacagctttttataagatttactaaggctgctttgaagtattaaatatgatactgttcttatatttattgtaggcttcctgttggataaaaaaattggagtaaatcaaccaaaacgaattgaaaatgctaaaattcttattgcaaatactggtatggatacagacaaaataaaggtatgtaactctactttttaaaaattaaaattactgcccaggcagagtggctcatgcctgtaatcctagcaatttgggaggccaaggtggtggatcatctgagatcagaagtttgagaccagcctgaccaacatggagaaaccctgtctctactaaaaaaaaaaaaatacaaaattagctgggcatggtggcgcatgcctgtaatcccagctattcgggaggctgaggcaggagaatcacttgaacccaggaggcggaggttgcactgagccgagattgtgctactgcactcgagcctgggcaacaagagtgaaactccgtctcaaaagtctcaaaaaaaaaaaaattgctggattctataaactcaggaatcaattgcactaaaaagcttggaataggtatgaatctattgtgtatatacacatatatatacgttggtaaaaatgttgaaatatgctatgggactctttaaaaagagtaatgaggcctggcgtggtggttcacgcctgtaatcccagtactttgggaggccaggcgggcggatcacaaggtcaggagttcaaggccagactgaccaatgtgagatggtgaaaccctgtctttactaaaaatacaaaaattagctgggtgtggtggcgcacacctgtaatcccagctgcttggaaggctgaggcaggagaatcacttgaacccagcgggtggaggttgcagtgagccgagattgccccactgcactccagcctgggcaacagagcgagactcaatctcaaaaaaaataatgaaactgatgctctctttatgcttcgtttgtcttagatatttggttcccgggtaagagttgactctacagcaaaggttgcagaaatagaacatgcggaaaaggaaaaaatgaaggagaaagttgaacgtattcttaagcatggaataaattgctttattaacaggtctgtgtttgcttttaagaaaggatttttttccatgaaagtttatggaatacttcatatttacttatattgaattagattttttacctaggaactgtcttagataacttcacttaaattatggatttttgtaatcagtaaattgtgatttatgcacacttacagtgaccagaattacgggattgatttatacagttactataataaagaacacttcttttcatactagtaatggatgcattagtactatagttgataaactctaattatataggtaagaaatgcaatcttgttctaatttgcatttcttttacttgtggtaaaaatgtttacatgttttttagtctaatgtagtttatcttgtaacagttgtgagcataatgttttcatgtaaaatatttacaggcaattaatttataattatcctgaacagctctttggtgctgctggtgtcatggctattgagcatgcagattttgcaggtgtggaacgcctagctcttgtcacaggtatggaaaaaaggtattgttttctaacaaacacaatagtcactcttgaatttgttatttgttactatatgcaactacctttaaggagtttagaatttcagcagttattctgaaatctattctcttggatacctttaatttagatacatagatacattacatttacgataccaagttatataccacatttgccgtaggtatagatttctttcattgtgtcactgttttaaaggtagatttttggccaggtgcagtggcttgtgcctgtaatcccagcactttgggaggccgaggcagccagatcgcttgagctcaggagtttcagaccaactttggcaacattgcgaacccacatccctacaaaaaaaaaaaattggccaggtgtggtggcaagcgcctgtgatcctagccacttggggggaggctgagggaagagaatcgcttgagcctgggaggcagaggttgcagtcagcggagatcgtgccactgcgctccagccttggcgacacagtgagaccctgtctcaaaaaaaaaaaaagatatgtatatttttttctcacaaacctgtaagaccgttgttaaaatctgaacaaactagagctttaaaaagtcttaagtctacttacatttatctagttcgtacatttgtttttattgcttagtaagtagttgaatgctttgtgtcctttgtagtagtacagttacaatagtaacctttattgaacatttactgtgtgctggagagtgggtcaagtactgaaacattgcttttgttaattttaaaaaatttctgaaagtaataaacgttagcatacgtgaaacaatcaacattgtataatgaaaattagtatacctcaataccctttaatagaagtatgagtgatataattccagttgtgtcaaatagaaattgtgtttataaatcagacatgtctgtctacatcacaatgacatgagttcaggctggttgcggtggctcatgcttgtaatcccagtgctttgagaggccaaggcaggaagattgcttgaagccaggagttcaagaccagcctgggcaatatagtaagactgtctctacaaaaaattagctgggcgtggtggcacatgcctgtagtcctagctacttgggaggttgaggcaggagatctcttcagcccaggagtccaaggctacagtgagctgtgatcacgtcactgcagtccatcctaagtgacagagcaagaccctgtctttaaaaaaaaaaaaaaaaatgcagcttgtttgctttttattgtggtaatggtttaaaaattattgtttattaaatttttacagatttagggatataagtatagttttgttaatggttttcatagtacactctaagccctggaaaataagtttaacacttttctagattttaggtccttgaaaatgaatgaataggttggaaagttggtttgggaatgagaattaaggagacctgggttatgagttgtgaagtcagtagggctgtcacactgtttggaactgccatgaatattagaagaaattatagtgtactaacctttggagagtggacttggtctcatcccagaatgatctcttaagacgttttttttaatcatttgagaagcatagtcgtcttctaaccaagagacattttcctttaattacttgaagtgggtttacttgctttaaagttacttaggagccattgcgtacttgatgctttaaggtgacaaataaacacaatttaagatgctcatgtttatgtaattcattctttagttccacaaaataaagatgtaagaggccgggtgtggtggctcacgcctttaatcccagcactttaggaaggcctaagtgggcagatcacaaggtctggagtttgagaccagcctggtcaatatggtgaaaccctgtctctactaaaaataaaaaaattagccaggcgtggtggtgggtgcctgtagtcgcagctactcgggaggctgaggcaggagaatcacttgaacccgggaggtggaggttgcagtgagctgagattggcgccactgcactccagcctgggtgacagagcgagactccgtctcaaaaaaaaaaaaaaaaaaagatgtaagaagtaaatggtaataatatattgatgggataaacatatcgtaaggtcttgacatgaaattgctctatacccagaagaatgtttattaagtacaccaactgtatgtctatgaaggtgaccacatggtggctcccatccttaaaagctcagtggttgtcaaaggtgtatgatgacattggttcttgcaagtgtcattaaataaatgtcttgcactgggcatggtggcatgtgccagcagtttgatctattcaagaggctgaggcagaaagattgcttgtgcccaggaggttgtgctatgatggtgcctggtgaatagtcattgcgctccagtctaggcaaggtagcaagacactctctctttaaaaagaaagaaaagtctcatgtagaaggatgaagtgaaaagtttcataagccaagttagtcttatttttggatatgacgtcccaaatatctgttgtgtctcacatctagaacacaaagcagtctcagaattttgccagccaaaagtaaaaagaactttatacaaattatgagtataaattagtagtttcaaagaccagagtctttatgaatttattataaaataaataatagagcattgacagatttatcagtaaggcataggaaaagaagggttgattgataatatatgcaattcacattatgaaaggagtagtcagctagagaaaaggattttgaaatggaaacctgacttttgcttagttaggaaatagggaacgaagtggctgacctgttcagtttacagcatggaagatggagggaaaataggaatagaaatgagacataaggactaaattaatttgttcttattaaatttggtctgggaaattcttagtatgcatttcttgtttttttaggccttaggacatttcatttgtgataattagagatatcaggtgcttattaagcagttcatgaagtgtatagtggttgacttataggacaaatattttcatgtcttgtgctgggaattgtatcatgaggtcttagtcttataggttggattcagaagagaatctgaatttaaactcaaaagtaactgctttaagactcagtttaaccttgggaaggtagtattgtatagtgtgtgcttataggtctgaagccagactgcttgagtttgaaccccagctttttatattcatcctagttaggtctttggataggaaggtaaacctcttggcctcatttttatcatgtgtaaaatgggataataatggagcctatccaagaggattattttaaagattaaataattagtcgatatgaagtatttaaaaagagtgccaggaatataatcagcaatcaatttttaaaatgtgaaacacattacctatcattatctatccattactgcttattagaaaacaggaattttaagcctgctgtgcatttaactaatacatgtttatgtttataggtggtgaaattgcctctacctttgatcacccagaactggtgaagcttggaagttgcaaacttatcgaggaagtcatgattggagaagacaaactcattcacttttctggggttgcccttggtgagtgattatgtagatcctggttagggtgtctaaattcttgctaggctctgttgaagtaaaggttattgtagttactagaatagcatatcttacaagtcttaactcttcagaagcatgatacatactttgtttcagtctcttgagtcaacctcatatttaccgtgtctttgtgaacagtgcatgttcaacagttttttttccttgataacttagaaccattatgagccttgattgttggagaatgtataatacaggaagacaggtcagctttcagaacccagtaatataaccaacaccggcataaataatagaaggcaaactttttatccctaagtggtcactgtgtcttttaattttaggtgaggcttgtaccattgttttgcgtggtgccactcaacaaattttagatgaagcagaaagatcattgcatgatgctctttgtgttcttgcgcaaactgtaaaggactctagaacagtttatggaggaggtaagcatttagaaaatgttgaatatatttttaatttcttaaagtacaatataagtcataagtggttttaatggttcttacagaaatcttatattgcttttgcactaaattttaaaatgcttggcatatcttaaagtcagtaattcagtatcttggagacaactaagcattgcaatattttattggaattttaatctttaggctgttctgagatgttgatggctcatgctgtgacacagcttgccaatagaacaccaggcaaagaagctgttgcaatggagtcttatgctaaagcactgagaatggtaagttaatcaaaatgagagatccgaacttaagttttgtggttattgatagttttaaaatgagtagaaaatgaactggttaatactgcttttaaatttgattctggagtttctcctcttcgtgagcagtaactgaagcagattttacattgttcctaaatgtataattttaaaaagctatcctagttaggagtaaatcagtggttcttacagtagagtgagtagttacttgttttcttcattttcatagttgccaaccatcatagctgacaatgcaggctatgacagtgcagacctggtggcacagctcagggctgctcacagtgaaggcaataccactgctggattgggtaagcaatcaaggggaactttgtggccgttgttaaaagtaactcttttcactaagctttttttttcttttggaacataaagagttacaataaccgtataaaagactcttttggactttgtcctcataatcattacatgtgctgggaaaatgtgtgtgactttatatgctcagcatttcccaaactttgttattccataagacatgtaaaactggttagaagatttgtaactatttggtatataacgactataggatttaaatataaacaatacttacattctgaaaaataacataaactattatgttgtttatacaatcagtattaacttctaatttcatagtaaacttactgcaagataatcttgagtacagatcacagatctctagtccatagataaaagtggccaatgaggcagatttaattcatattgaaaaactttctgacaagctgtgctggacattatagagtagtcttaagaaggtagataatcctgtcattgaacaagagggagcaccagttaatctgtgagaaaatgaagcaggattctcacaagaagagaagttgggtaggtaacttatgaattttcttccatttgttttttattatttgatatgttgtcttctattaatatgggtgatcagtagttgacattattgttgttattactattattataactgacacaatggtcttgctctgttccccaggctggagtgcagtggcaccatgataattcactgcagccttgaacccctggctcaagcagttctccttcctcagccttccaagtagttagggctaaaggcatgtgccacaatgcctgactaaattatttttattttcttagagatgggggggcagtctcactatgttgttcaggctggcctcaagcaatcctcctgcctcagcctcccaaagtgctaggattataggtgtgagccactgatcctggccccttttattttatttatttattttttgagatagagtttcactgttgttactcaggctggagtgcagaggcatgatctcagctcactgccacctctgcctcctgggttcaagtgattatcctgcctcagcctcctgagtagctgggattacaggtgcccaccaccatgcccggctaattttttatatttttagtagacggggtttcaccatgtttgccaggctggtctccaactcctgaccttaggtgatctacctgcctcagcctcccaaagtgctgggagtacagatgtgagccgctgcacccggccccttttaatttttttaaaggctttctttgagctcatttgtaggcttatctacctactgagtaaagtagttgggtgtcctaattttattaataggattaatttttattataaatcattagagatgttttgatactttagttaaaactgctttttagtaaatttgtttttctttgcagatatgagggaaggcaccattggagatatggctatcctgggtataacagaaagttttcaagtgaagcgacaggttcttctgagtgcagctgaagcagcagaggtgattctgcgtgtggacaacatcatcaaagcggcacccaggtaccctaacacttttctcagaaaaaattactaacagcaaaacaaaatagggagctgtatttattttataattagagttaatgaaaagcagagacagttttgcctggataaaagtatgtaagttatttaaaatatcacaactcttaacacttaagccagaaaaacttaaggggaaagagggatgggcagctgaggtagctcttaggattgaaaaggcacagaaagagccatgcttggaaaggtcaagtactgaggacagtagatgctgtgatgctttctattgtctttaaacagaatgatagcaaaaggaaactgagttctgtaactaaagtgttctagggcaaggtcatatagccacacctactcccagaaatcttcacaagaagtcagtgccctcacccacagttgaaataacgcttaaaaaatgtataataccttgtttggtctgatactgttttagagatcaggtatcttttattagcaaattctgagtaatttgcaataaagaaactgaattttaactcagccttccagacctaccagaccatgggcttctttttcatattccttattaatctccagaagactttttttttcagatcagtgccctgtgacagctgcttcataactcttgacaatggttagcatcctagtccccccataagctaccaagggtgaaaagtttatctctctatatgatccctgtataatgctgtactctttgatctgttcttaagcttcttcagcttctcgtaactgttgtgtttgcctctaaaagcagtgtttctcaagctttagatccttgaacaagcattaagtacaaatttactagtacccttatcccatctttccaaaagattgttctatgcccccttattgtatggtcatcaaagaataaaagatgagaatagaaggtgcttcttgttggtgggggtgtctgcagagtcccaaggcagaacagtcctgatgtggtgcagggcatcacacagaggagggggctgagtggctagctcaggtctgtcttcctcctcacctaaagccagcagtcccatcctatataacccattagtccatgacataacttggtcacctcttaaaagcccaacttccaatactgccacattggggattcagtttcaatgtgagtgttataggggacacacatgcaaaccattgcagagttataacagttttaatacaggattctagttgtgtttgtatttagtataatactttggataaaatcatgctcttcatttttcactattgacttttttcttactctcataggaaacgtgtccctgatcaccacccctgttaagcattcccacgtgctgtcgatctttggaccagtttctagcaaagttgtgtttgaaagatactctattaaagaagactgtggaatctgtttatcggtgcccattatatccttaagtttggatatttagctgaccttcgctttaacataggtctaatttatttgccgtgtcattttccatacaaatcagttgatttaaaaaagttcatttctcatactgtgcattaaaataaaaatttgaacaattacttggttct

SEQ ID NO: 370 - DNA, 100 bp, Homo sapiens
ggtggatcacttgaggtcaggagttcaagaccagcctgggcaacatggtgaaaccccatctctactaaaaatacaaaaattagctgggcatagtggtggg

SEQ ID NO: 371 - DNA, 1239 bp, Homo sapiens
gggggagtaattcttagtcccatgttagaaagggggacgtgggacagaacaactgttcacacgtgaaatctagtgattggccaggctccgtgctaggtcttacattatcatttaattccagtactgtcctgagaactaagcattaggagaagcagcatggggctcaacagtgaagtgacttgttccaggcgggtcctcaggagtggctgtgcagccccagtcacttttcatcacaccggagagggacgcacaaccccagtcctgtttagttgcagatataccgagaagggagagcccacaccgaccttaagggcacttgggccctgaatcctatgcctctcgttccactgcttctcagttgccctcctacctggctggccaggtttggagtctctctcccctgctctggcattccagtcttggcctgaagcacgctatgcctctcatacagtctgccttttctagggtccaagcagcatcccaagttctgttgagatgcagcttgcagtccaggaggacaacggtcacccccatcttcccatgtttttcttgctttaagccctcccctaagctttcacatataatcaccaggggttcagaaattgtcagccagttctccttatgctttaagtagattttcttggggccagatgtcttgaaaaacgctctcctgactcagcagttcctggaatttttggcctatcatttatctcactgttctgagtttacttgtaagcctcttcgcttaatgtttgaatcaagatgagcagtaataacagcttcttgtgtaccaattactcagaactcacttaaattgccttaacactttttaaatgttcttacacatttgaaattctttagggagggatttccagaactttcctaaatttctccacccatggcatgacagtacttagaggggcaagaagttcaattttagaataagctcttctgggcgcgatggctcatgcctgtaatcctagcactctgggaggccaaggcgggtagaatgcttgagcccaggagtttgagactagcctgcaatatgcgaaaccctgtctccacaaaaagccagacatagtggtgcatgcctgcagtcccagctacttgggggcgctgagttgtgaggatcacctgagcccaggaggcagaggctatagtgagccatgatcgtgccactgcactccagcctgggtgacagagtgagacgctgtcgtctcaaaaaaaaaaaaaaaaaaa

SEQ ID NO: 372 - DNA, 2719 bp, Homo sapiens
ctgcccctgtgggccgcacctccaggacctgttcaccggccaccggttctcccggcctgtgcgccagggctccgtggacctgagagcgactgctcacagaccgtgtccccagacaccctgtgctctagtctgtgcagcctggaggatgggttgttgggctccccggcccggctggcctcccagctgctgggcgatgagctgcttctcgccaaactgccccccagccgggaaagtgccttccgcagcctgggcccactggaggcccaggactcactctacaactcgcccctcacagagtcctgcctttcccccgcggaggaggagccagccccctgcaaggactgccagccactctgcccaccactaacgggcagctgggaacggcagcggcaagcctctgacctggcctcttctggggtggtgtccttagatgaggatgaggcagagccagaggaacagtgacccacatcatgcctggcagtggcatgcatcccccggctgctgtcaggggcagagcctctgtgcccaagtgtgggctcaaggctcccagcagagctccacagcctagagggctcctgggagcgctcgcttctccgttgtgttttttgcatgaaagtttttggagaggaggcaggggctgggctgggggcgcatgtcctgcccctatttcccggggcttgccgggggttgcccggggcttttggggcatggctacagctgtggcagacagtgatgttcatgttcttaaaatgccacacacatatttcctcctcggataatgtgaaccatttaagggggttgttactgggctgtgtgagggtggggtgggaggggcccagcaaccccccaccctccccatgcctctctcttctctgcttttcttctcacttccgagtccatgtgcagtgcttgatagaatcacccccacctggaggggctggctcctgccctcccggagcctatgggttgagccgtccctcaagggcccctgcccagctgggctcgtgctgtgcttcattcacctctccatcgtctctaaatcttcctcttttttcctaaagacagaaggtttttggtctgttttttcagtcggatcttctcttctctgggaggctttggaatgatgaaagcatgtaccctccacccttttcctggccccctaatggggcctgggccctttcccaacccctcctaggatgtgcgggcagtgtgctggcgcctcacagccagccgggctgcccattcacgcagagctctctgagcgggaggtggaagaaaggatggctctggttgccacagagctgggacttcatgttcttctagagagggccacaagagggccacaggggtggccgggagttgtcagctgatgcctgctgagaggcaggaattgtgccagtgagtgacagtcatgagggagtgtctcttcttggggaggaaagaaggtagagcctttctgtctgaatgaaaggccaaggctacagtacagggccccaccccagccagggtgttaatgcccacgtagtggaggcctctggcagatcctgcattccaaggtcactggactgtacgtttttatggttgtgggaagggtgggtggctttagaattaagggccttgtaggctttggcaggtaagagggcccaaggtaagaacgagagccaacgggcacaagcattctatatataagtggctcattaggtgtttattttgttctatttaagaatttgttttattaaattaatataaaaatctttgtaaatctctatatacatctggtcattggaggttccagttataaacccatcttagttccacccctttcccctcaaagggggagcaggggtcaagtgaccccaacccatcctgccagggcagggcctatcttcctgcctctggaagacttgttgcaggtgggtagtgggtcagattccaggtaggatgaactgggagaagctggcaccccaggtctggagggggctggggtgcagcctccagctgtagctgcctcctgccttccgaaggcagaaggaatgaaagatgcacattctgggctgacgggcatggctagcaccatcctaggccacccacgaggggctcattggcatttgtcgtcgctgtcggaagggctgccctcccgggggaggccatgacgggagtggggcccccagagtgcatgcacctcagtggtctccgtgtcactgctgctggtggcactgtctcggaagctggcgaggggcggccggactttcacaccctgtgctgtgacagagccctcgatggccttccggagctggaaaggtgagagggacagatgtctggacccagatgtcagactcctccccgccttcctccccaggtgagctggacataagcctccatgactttttggaagtggagcagctttggaggccaccatcacctcacctcctttagagtaacgattccaatgagtctgccaatactggtgacataagcatggtccactcccagcagtgagaagatagtgtgagtctgcagtgtggggagaaaagcgattggacttgatggacgaggggcagctctaaatgacaggccacaggggcccaggacaaggttggtgtggaataggaggggtgccccagattgggagggaaggagacaggactgctggagggaaaataataacaatcgtaataataatgagaatgtttctgtgtccaggcctcaggaacttgat

SEQ ID NO: 373 - DNA, 224 bp, Homo sapiens
agatcgagaccatcctggctaacatgggaaaccccgtctctactaaaaatacaaaaaattagccgggcgtggtggcgggccgcctgtagtcctagctactccagaggctgaggcaggagaatggtgtgaacccaggaggcggagcttgcagtgagccgaggtcgcgccactgcactccagcctgggcgacagagcaagactccatctcaaaaaaaaaaaaaaaa

SEQ ID NO: 374 - DNA, 24413 bp, Homo sapiens
ccggctcgcggcgcgtggaggctgctcccagccgcgcgcgagtcagactcgggtgggggtcccggcggcggtagcggcggcggcggtgcgagcatgtcgtggctcttcggcattaacaagggccccaagggtgaaggcgcggggccgccgccgcctttgccgcccgcgcagcccggggccgagggcggcggggaccgcgggttgggagaccggccggcgcccaaggacaaatggagcaacttcgaccccaccggcctggagcgcgccgccaaggcggcgcgcgagctggagcactcgcgtgagtgcggcggggcggggcggggcgggcgggcgggcgggacgggccggggaagcgggagccctggcccttgccgctcctcgctgctgtcggcagccacttcccgggcgagactgcgcccccggagcacccccggccggagccgtctcgcgtgccgggaggatcggactctttccgtcacccgtttgcacctctgcagctgtcaggagcgggtcaggtgcgaaaagcggtgcggaggtggcgctcataggttacaggggtcagggtctggggctggccgtggtcttcagttaccgccgagcgtgcgggatccttctgcgcttgccgcctccacgtggcacaggccaaggcgtggccagatgggtagatgggtttgttgggtggttgctagcagtttccacgtaacaagggaagcgtatttgagagttacttgattctaacgagactagcagatttgcacttcttgttggaagacgttagcatttgcacggcgaggtctgtgaagccacaggccaggccgtgctgctcagcttgagtaaacccctgacccaaggccctcagggtgtgagcactgactgcaccttccctaagctcgggtctcttcccccagccttcctttcccctgtggctttaacgatttgtagcacgatgcagttcaaatggctaggagtctggaacgtagaaggtgctgaattcattgaaagaatacagtggttctcaactcttgtttaagccggggttctttctatttatttatatattgagacacagtatcgccctgtcgccgaggctggagtgcagtggtgcgatttcggctccctgcaacctccgcctccgattctcctgccgcagcctctcgagtagctgggattacagccgcgcagcaccacgcccggctaattttttttgtatctttagtagagacgggtttcaccatgttggccagggtgctctccaactcctgacctcgtgatccgcccgccttgtcctcctgaagtgttgggattacaggcctgagccacagcgcccagacagaagggattccttttttttttttttttttttttttgagatgagtctcgctctgtcgcccaggctggagtgcagtgacgtgatctccactcactgcaagctccgcctcccgtgttcacaccattctcctgcctcagcctcccgaatagctgggagtacaggcgcccgccaccacgcccggctaattttgtagagatggggtttcaccgtgttagccaggatggtctcgatctcctgacctcgtgattaattttttgtatttttagtagagacggggtttcactgtattagccagggtggtctcgatctcctgacctcgtggtccacccgcctcggcctcccaaagtgctgggattacaggcgtgagccaccgcatgccacctttttttttttaagatgatgtcttgctctttggccaggctggagtgcaatggcgccatcttgtctcactgcaaaccgcaacgccctggttcaaagaattctgctgcctcagcctcccaagtagctgggattacaggcacgcgccaccacgcccagctaatttttgtatttttagtagagacgtggtttcaccaccttggccagggtggtcttgaccacctgaccccgtgatccacccgcctcgacctcccaaagtgatgagattacagtcctgagccaccgcaccctgccagcaggggttcctttttagaaagaagatcatttagggaatccctggtgtgaagcagatataaacagagtttccctgtttaaggagggatggcctggtggtacttgtggttccatcctgtgcccttccccggggtgctggggaacatcctgagctgaggtttctggccccggctgggtctcataaccccagagggacattcaggtttgggcccaggcccaggctaacatggatagtcctagctgggcaccaccgacagtgcgtgttctgttttgaagagatggggtcttgctttgtcgcccagtctggccttgacctcctgggtaaaagccgtccaaccgtctcagcctcctgaggagaggggactgcaggcttgctcggtaatttttcttttttcttttctttttttctttttttttttgacggagtctcgctgtcgcccaggctggagtgcagtggcgtgatcacggctcactgcaagctccgcctcctgggtacacgccattctcctgcctcagcctcccgagtagctgggactacaagtgcccgccgccacgcccggctaattttttgtattttttttagagaccggttttcaccatgttagccagaatggtctcgatctcctgaccccgtgatccacccgcctcggccacccaaagtgctgggattacagacgtgagccaccgcgcccggctttgctccgtaatttttctgtgtgtttttgagactgagtctggctctgccgcccaggctggaatgcagtggcatcatctctgctcactgcaacctttgcctttggggttcaagcgattctcctgcctcagcctcccgagtagctgggatcacaggcgcccgccagcacacctggctaatttttgtgtttttttactagagacggggtttcaccatgttgtttaggctggtcttgaattctggcctcaggtgattcgcccacctcggcctcccaaagcgctgggatgacaggcgtgagccgctgctcatggccttcctcggtaattttaacgatcaggttaggatgggaatcaagggctggacttcagggcacctcggaggacagcggatgttggtgactgactttcttgctgcaggcttatttggagggttcctttgtgtcctagttcctgggggttttcacccgctaacttcacttagagattgaaacttctcccacttccagaagctgaatcgtagtgatcagcctgcggccccctgcagtggtacaggcctggttgagcagcctcaggccgcctccccatagtgcagacctgtgcctctgagttgctccagtcctggcggccccggagctcctgacccgcagtccgctctgccggcgttgccagtgccttggtctgccctctctgtggtggagcggggcccggggcagggtctccaggtgcaccgtggggagccctccatcaggcttttgtttctgtggattgtgttccaggtgtgggctctttcattttgatcccttctctccttcctggcctcactgctggcgggtgagagaggtttctccggagttgactgccccctttccccgggtgccccctgccctgcccctctgcctggtagcccctctgcaagcccggcccctcccgacgctcctggcttcctccgtgcccctttcctggcagcggggtcgccgagattcgcccgttgctttgtccttgctgctctccaggcaaacgggcggctcctcctcaccgactgcctcctctgtcccttgaggctatagccccatgccgcctcgttcccagagtctgccctgacccctcctccggcctgtccttggaagtcacagcagtacattatcccagaactgtctgtgagcaccagcgctcgccctgcactccacagagggggtgcctggaggagagcctcgtgccctgtgggtgtgaattcacgcgctgggacgcacgtccctggcacagggtcacaccaaagtggtgaatgattgttctcattctaataaccgagaggccacacgggcacctgacctgctctttcccctctcctcctccccagagtcactgggggtaggaactgtcaatgagccattttcaggggagggagtggcctcagcttaatccagccaaaggtcccctcgggaggaaacaggcagagctcctcaccgtgacacccacgttcctgtcactgctctgtggcaggaccctgggggactgacacaccctcagtcccctcggggtcagagtgagagtggttgagagcccggggtcgcttcagcccttggcttcccgagtttagcagccaaacccgttgacctggcactgtcttccctgagaggcaggtcccggtctcatctgtgctctgttcactggggcccccgaggttagctaccaaggcgcttcctgaaatgtgacgctgatgcccgtcagcccagttcgtgcctaaccacaggcccaagcagacccaccccaacaccaaagtgtcgctgcctctgtctaaatgcaacgagtgctccccacggcacttccccctgcgtcagtcacctccaaaaattacacctgagctgagaacagacgctgggctctagttagtgacgtgtttgctgcagttgactctgaaggcttaaaaaagtgagacgggctgcgggaggaagagagacgggaacaacgcaccaacccaggagcatcgggggtccctgcctactttacacgtctttctgtgttagaataatttttttttttttgagacggactcttgctgtctcccccgctggagtgcattgcttcgatctctgctcactgcaagctctgcctcccaggttcacgccattctcctgcctcagcctcctgagtagctaggactacaagtgcccgccgccacgcccggctaattttttgtatttttagtagagacggggtttcactgtgttaaccaggatggtcttgatctcctgacctcatgatccacccgcctcagcctcccaaagtgctgggattacaggcgtgagccaccacgccctgctagaataatttttttttagagacggagttgcgctctgttgccccggctggagtgcggtggtgcgatctcggctcgctgcaagctctgcctcccaggttccagcaattctccagccttggcctccccagtagctgagatcacaggcgtgcaccaccacacccagcttttttttgtgtttttagtggagacaggatttcgccatgttggccaggttggagattttatttttcttaagtctcactctgtccagctggagtgcagcagtgtgatctgggtgactgtagcctctgcctccggggttcaagccatcctcccacctgagcctcagagttgctgggattacaggcgtgaaccaccgcttcccactaggtttttgtatttttagtagaggttgggtttcaccatgttggccaggctttggtatccgtgtatcctacacctgctctccgtgccacatgcgcccgcaggttacgccaaggaggccctgaatctggcgcagatgcaggagcagacgctgcagttggagcaacagtccaagctcaaagtgagtggggccggtgtgggcgaggaggccggggcgcacatggggttcaggcgtggagattggtggggctgctactggtgggtagggccaggggcgtgtacatgggcagcagtggggccagggccgagcttgggcgcctcatttcacagagggaaacaaggggaggtgagagacgctgccgcagagccgcccgagagggagggtcagtgttggtgagggcgtctggtcgtcctgagggagggccggtgttggtgagggcatctggtcgtcctgagggagggggtcttcttcacattctcacctcatttcttttcactcagcaggattttttattttattttattttattttattttattttattttatttattttgaaacggagtctcactcttgcctaggctggagtgcaatggcgcaatctcggctcactgcaacctccgcctcccgggttcaagcgattcatctgcctcagcctctggagtagctgggattacaggcacgcgccaccacgcctggctaatgttgtattttagtagagacggggtttctccatgttggtcaggctggtctctaactcccgacctcaggtgatccacccgcctcggcctctcaaactgctgggattacaggcacgcgccaccacgcctggcctattttattttattttgagacagagtgtcactctgtcccccagtctggcgtgcaatggtttgatctcggctcactgcaacctccacctcccgggttcaacctcctgcctcagccttccgagcagctgggactacaggagcctgccaccacatctggcgaatttttgtatttttagtagagaagggggttcagcatgttgtccaggttggtcttgaactcctgacctcaggtgatccagccactttggcctcacaaagtgctgggattataggcaagagcgatggcgcccggcccactcagcaggattcctagaatgggcacgagctctgccctcatcacagtccaaaagtgagcacctgcctggagctgcccagaaacagccttgtggggtggggttggtgtctgacctccctccccgggggccttcgcaggcttctctgctggtgcttctgtgcctgtgggtctggattcctccagggcctgatcctgggtgcagatgcagctggaagccctgaacctgctgcacacactagtctgggcacggagtctctgccgtgccggagctgtgcagacacaggagcggctgtcaggcagtgccagccctgagcaagtgccagctggtgagtgctgtgctctgcaggagtatgaggccgccgtggagcagctcaagagcgagcagatccgggcgcaggctgaggagaggaggaagaccctgagcgaggagacccggcagcaccaggccgtaagagcgcaagaggccgcgagggaggccgcccggctgcggggagcggcctggggcaggactgggagctgggtgtggtcccggggcactctggagtcagccattagagctgccctcggaacggccttgcacaaacgcctaagacctgtaaggtccctcactgctgagccggacgggaggtccccgcgcctccccacgtttgtgtgaggctgatggcgcgtcggagtccccggcgctccgcccagtcggcccagactgcagctcccggctgagatgtgtctttgccgccctcttctcccccagagggcccagtatcaagacaagctggcccggcagcgctacgaggaccaactgaagcagcaggtgagctcagcctcccctgcgaggcgcctgcgtccctgagaacgtaggtggctttgtgggaccagtcagtgggtcagaggccacggggcaagaacgatggggttgctgacggtgggtgctagagcaggggaaactactcggacagacacgcaccagcacacgtgtacaggcacacatgcagatgtgtgcacacatgtacacggagacacaggcacctgcccacacagacacacactcctcgcacacacactcccggcagacaggcacacacacccctgcacacatgggcacacacacacccctgcacacacgggcccacacactcccctgcacacatggggaaacatgggcccacacacacacacccctgtgcgcacacacccctacacaggggcatggacagacacccgcaaacacacccccacacaacacgggcacgcacacacacaccccgccacaacacaggcacacatacccctgcacacaggcctgcacatacacccccacacaggggcatgctcacacagcccgcacacacacaggtatgcagacacacccaaacacacatgggtcctcaggcacacactcccgcatggggcatgcacgcacctcccacacacacccgatcacacataggcatgcacacccctctgcacacatgggggcttacacacccccccgcacacgtgggcccgctcacacagcccacacacataccccttcacacaggcacacaccgccccgcacacacgggcctgcacacacacccccacacgggcatgcacacgcccacacacacgggcgcgcacacacccggacatgcacaaacacccacctgcacacacgggcacaccccaccacacacacacacaggcatggacacacgcacaccccctcacacataggcacacatacacaacccaggcacacacccccttgcacagacgggcacgcacacagtcccacacatgggcacacgcgcacaccgccgcaaacacacacacgggcacgtgtacgcacccccactcacagtgtgcctcatacatacgggcacgcacctgcacacgagggcacacccccaccccccacccccacacacccccgcacccatgggcacacacacattactgcacgtgagggcatgcacacacacgccctgcacacccccacacacagaccccttgtgtgggttccacagcagcggctctccaggcacgacaagcctccttgtctcccacccgggcgcccagctggcagtctgggaggttctgcttgggagggctggtcagtggcggcgggcgggtctctgggtctatgagaaaagcttgggtgacatctgttccctggtccttagggaccgtcaccttcagtcctgagctcgcaggcggggttcacatgttgcctgttgtgggcattgtagctttaacgtttaattggcggaagacagaagcttccttaagcccagcctgaatcagggcagtggtgttgggaggtcggcccgcggtggcccttgtcagggaagccacagtgggggctgtttctgccactggggagtttgggaccctgaacccatcccctcagtgactgccgtcccagccgatgtcacccgtgtctgtgtcagggtgcggcgtctgcaggtccccaggtgcccaggacgcttggagttctgtggtcctggggcggacgcaacctctggattggtgttgagcatttttctggttttaaaggcttttctctttttctgcggcttcttctcagcaacttctcaatgaggagaatttacggaagcaggaggagtccgtgcagaagcaggaagccatgcggcgaggtaggctgtctgctctcctggctggggcggaggtggcgggggctgcttgtggatccggcgtgcactctgagcctgagttctgccgcccggcccctcatagctaccagtgcagtgggcgaggcctgctggggctctgcggggtggggctccctctcggaagacacctctgtctgcgagtggacgccaggatctgttcagggagggcaggagctgcttcacttcatgggaagtacaggggccttttttttttttttgagacggagtctcgctctgtcacccaggcaggagtgcaatagcacgatctcagctcactgcaacctctgcctcccaggtttaagcaattctcctgcctcagcctcccgagtagctgggattataggctcccgccaccacgcccagctaatttttttgtatcttcagtagagaaagggtttcactgtgttggccaggctggtcttgaacttcttgatctcattatccgcctgccttggccttccacagtgctgggattacaggcgtgagcctctgcgttctgcctagaacatgggtctttactgtcctggtttcagtggggatcacaggtatttggtgccatgtggcatttgttggcgagtgctccaggcaaacgtctgtcaccactcttcaccgtgggtgggcttgtggcgaggtgtgtgcgtttaatgttcagtagccaggcacgtggcacgtcacgcgtgtctgagttctgacagctgtgtttctgtgtgaggggggcttccttcagaactccgcgttctggttttttgcttcaaagagctcgtcctgagaagttgcctaggcctctgggtcggatttctgccctaatccatgggcagggccggcctgtggcgctgtccctaccaaggtctgtgtgtgtctgtggcacgggcctgtccatggactgggcttgtccgtggagtgggtcggtccatggccttagcctgttggtggcgtgggccggtccacggcatgggcctgtctgtggcgtgggccggtccgtggtgcgggcctgtccgtggccttagcctgttggtggcgtgggccggtccgtggcatgggcctgtctgtggcgttggtctgtccgtggcgtgggccggtccgtggcgtgggccggtccacagtgtgggtggaggtggacgtgctgcactgcatggtgctgagctgccctgcctctctggggcagccaccgtggagcgggagatggagctgcggcacaagaatgagatgctgcgagtggagaccgaggcccgggcgcgcgccaaggccgagcgggagaatgcagacatcatccgcgagcagatccgcctgaaggcgtccgagcaccgtcagaccgtcttggagtccatcaggtgagcactgcccaggcccgggccggccacagatggagccccgcaggtgtgagtcgctggtcccagggcgctctccagctcttccaggcctggccgccataggctgactccttggtgggggcactgcccctctgtcctggcaaggccgtgccgccatgtcagggcctcaccctcaacctgctctcgctgcgtggtacggatcttcgtgtccttcctggtcacaccactgctttccccgcaggacggctggcaccttgtttggggaaggattccgtgcctttgtgacagaccgggacaaagtgacagccacggtaaacatattcataaaacagggctggcaggtggctgagaggcagcatgtgggggcctcctggagccccaggtcctgtccctgccggctctgcacagccctgtagctctcccagcacagagcaaacccacgttgtacctgctgggctcggctgctcctccctccttgagctgggagaaaaaaatgcagttgccagcctgggccacacggtgagaccccatctctacgaagaataaaacattagctgggtgtgatggtggcgcctgtggtcctgctactcgagaggctgaggtaggaggatcacttaagcccaggaggtttgggctgcagtgagccaacattgcaccactgcactccattcttggcgagagaataagaccttgtctcaagaaaaaaatggccaggcggtagtggctcaggcctgtaatcccagcattttcggaggcggaggtgggcggatcacgaggtccggagatcgagatcatcctggtaagagtgaaaccctgtctctactaaaaaaaagaaaaaaaaagaaaagaattagctgggtgtggtgacatgtgcctgtaatctcgggaggctgaggcaggagaatcacttgaacccgggtggtggaggttgcaatgagtcgagatcccgccactgcaccccaagaccagcatgaccaacatggtgaaaccccatctctgctaaaaatacaaaaattagcaggccaaggtggcgtgcgcctggaatcccagctgcttgggaggctgaggtaggaaaattggttgaacccaggaggcggaagttgcagtgagctgaaaccgcacaattgcactccaacctgtggaagaagagcgaaactctgtctcaaaaaaacaaacaaaataaataagccaggcctggtggctcactggtgtaatcccagcactttgggaggccaagacgggtggatcacttgaggtcagaagttcatgaccagcctggccaacatggtgaaaacccatctctactaaaaatacaaaaattggccgggcctcgtggcacaggtctgtattagctgagtgtggtgacctgagcctgtaatcccagtcactcgggaggctgaggcaggagaactgcttgaacctggaaggcggaggttgcagtgagccaagatggcaccattgcactccagcctggccacagaacaaaaccctttctctaaaaacaaagtcaagggcgcattaagcagctccttcatgtcctcaggtgacaccgtctcaccaacatggcaacaccacctgcaacattcaccgtcacgctgaccaggccaccggcaggtgctgcagtcacagcagtgggcgccggcaccacggcagagcaagtgcccactcagtgccgggcacctactgtgtgctgggcggggtggggggacggaggacacagccatgtgcgacctggggcgccaccacagcaggccagagcctgggcacaaaagagcgaggctttaaacgagagaagaatctgaacttcaaactctcagggttttattccgaataacgaaagtttttgcgaaatggagtcgggttcgctttctgggtctttgatttttttttttttgagacagagtctcactttcaagtgtgctgctcaagtgcagtggcgcgatctcgactcactgtcagcttcgcctcttgggttcacaccattctcctgtctcagcctccggagtagctgggactacaggtgtctgtcgccacgcccggctaatttttttgtatttttagtagagagagggtttcatcctgttagccaagatggtttcgatctcctgacctcgtgatccgcccgcgtgggcctcccaaagtgctgggattacgggcgtgagccaccgtgctcagccacagccagctaattttttcatgtttttagtagagacgaggtttttccaggttggttaggctggtcttgaactccaacctctggtgatacgccggccttggcctcccaaagtgctgggattacagacctggccagcctaaacgatttttaaaacaagttagagattttgggttagtcttgttttccaggaataaagtaccatttttagtggccaaggatgtaccagagggtgtggccctgtgacatccagctgggtctgcccagggccccgctcagcgaccgaggctttctaggatttatgctgccagttgcagagaaaatggccctgagtgagggcgttatgactgccccacctgcctcctgtaaccgcgtggctgtgggattcggggctgggaattcgggttcctgtggggccagcacacggccctgtgcttctccctcaggcggagagagggtgggggcagccccgtgcgtctcctgctctaggagggagggacggtgggggccggtgcgccagtgcggtgtctctgctgcaggtggctgggctgacgctgctggctgtcggggtctactcagccaagaatgcgacagccgtcactggccgcttcatcgaggctcggctggggaagccgtccctagtgagggagacgtcccgcatcacggtgctggaggcgctgcggcaccccatccaggtagcggcgcaggcctggccctccctgagtgcagttcctggctgagtcccttctgccccacgagcacagcccacgcacaccctcccgtcccttccctttccccggataacaggcacccgcacgctgcttcacgggtgggttttcctgtctggcgctgtaccttaggggtctgcatcagtgagacccttcccctgtctgcctcggtgtcccttgctcagggctcttgatggggcctgggagcacatcggggtccttgcaagacccgggacttgggtgtgcggccgtctgtcggggaagctgctacaggccatggcgtctggtggcctccctggggagccgcgccgcttgccagcccctgaggtgcctgctctccacaggtcactgggtaggtggttaagaaaataaaagccaataaggaaccggaaaatgcccctaatcccagcaatagcctcctggtctcccggcggggcagggttccagctccgggccggtcctggctgtgctttggggcagctccgtttctgtgtgttaccgagcatgtgtgtgcgttggtggctgttccgtggctgtggcaggtgacccaatggtgcttccccttcccctccggcaggtcagccggcggctcctcagtcgaccccaggacgtgctggagggtgttgtgcttagtgtaagtcggtgtgcctgggaccggggaggtgcagggaggggaccccggagctgggctgggctgtggcccttgctagcgctcgtggtggcgcccaggagcttttgggtcctgagatgcaactgcttggactgtgccggggatagataggctgcccacgagctgggcggcttcctgaggagcagagtccgcacccgggcattcccgcagcccctgtcaccgaggcttccgtgggtgcagagtgtctcccccaaacccccgtcttccccggcagcccagcctggaagcacgggtgcgcgacatcgccatagcaaccaggaacaccaagaagaaccggggcctgtacaggcacatcctgctgtatgggccaccaggcaccgggaagacgctgtttgccaaggtgagagcgcctggctgaacaggtgggccaggggccgctggggtctcacctgcctgcaggtgtctgggggcctcagccgcctggggaatggaccccccttaggcctttgcctaccctcgtgtaggctcagggtgctggtgtgggcagcagcgcctcccatcttccaggcgggggacgtctcctgtctggcaggctgtggcttccagacagggacacccggcaggggctccacactccaggtggagtgtgcaggctttgcagaggcagagggaacatctgttctgtctcccctcactcttcttgtccagaaactcgccctgcactcaggcatggactacgccatcatgacaggcggggacgtggcccccatggggcgggaaggcgtgaccgccatgcacaagctctttgactgggccaataccagccggcgcgggtgagacgtccccacagcatgcaccaggcccttggctgcggcccagcaggctgccttctgggaagggggtccaggtgtctcttggggaccctgtctttctgcagctctgtccttgtggccacgcaggaggcccaatggagggtccctcggagggaaagtcccctgagtgtggaccctggtggacacgaggtccccagcgtgtggaggctgccagtgggatacttggctcagggcagaagggaggtgggtgggtgcagggggagaggggtcttcacagctgcaggggaggctcctccacagccgccctccccccaacacgcctgcaggtgggcgtgggcactggttgccttttctagaaccatttgaaagttagctgaagacagcatggcacactcccttcaataggtcccacagtgaccccgcgcagggcacagcccgggcacccttgtggcctcggctgtcctcgttggaaccacgatcctcatggttggcaccctcccctctggcctttgacctttcactttagaagacctgtccctgcgccaggcgtggtggctcacggctgtaatcccagactttcggaggcggaggcaggcagatacgaggccaggagattgagaccatcctggctaacttggtgaaaccccgtctctactaaaaatacaaaaaattagccaggcatggtggtgggcacctgtagtcccagctactcaggaggctgaggcaggagaatggcgtgaacccgggaggcagagcctgcagtgagccgagattgcgccactgcactccagcctgggagacagagcgagactctgtctcaaaaaaaaaaaaaaagaccctgctccttgcgtggactcttgagcactgcactgggtcgctgtgtgggtgaaacctgcagggcggaggctgttgccccatgtgtggttggctggtgtgtgggtgaaacctgcagggcagagtctgttgccccctgtgtagttggtttcccactgccttctgaggctgagacgtggtcagctgcccagaggccaggctgatcggcttctgtcgagtccaggacttagggctcctgatggggcagagcctgaccccgtggggatctgcctgcctggcctgctcctgccgcggccggacgctgctgtgggctgctcctggcgtcactctcgccttgcttggcctctctctcgttcacagcctcctgctcttcatggatgaagcagacgccttccttcggaagcgagccactgtgagtgtcactaagcctctgtctggccacaggagggtggtcgggtgggcgcggctgtcatcctgggccaggctgcagcccttaagctggcttgcagtggcgcaatcttggctcgctgcaacctctgcctcctgggttcaagctgctctcctgcctcagccccctgagtagctgggattacaggtgtttgccaccacacctagttaagttttttgtatttttagtagagatggggtttcaccatgttggtcaagttggtcaagaactcctgatctcaaatgatctgcccacctggcctcccaaaatgctgggattacatgcgtgatccaccacgcccagccatacagttattattttaatacagggtgtctgtcgcccaggctggagtgcaggggcgacatctccagctcaagcagtcctcctgcctcagcctcccgagaagctgggattgcagaggcacactaacacgcccggctaatttttttgtaacgttagtagagatggagtttcccacattgtccaggcagggctcaaacttctgaactaaagaaattcaccggccttggcctggcacagtggctcacgtgtgtaatcccagcactttgggaggccaaggcaggtggatgacgaggtcaggagttcaagaccagcttggtcaatatggtgaaaccccgtctatagtaaaaatacaaaaattagccgggcgtcgtggggcacgcatgtaatcccagctgctcaggatgctgatgcaggagaatcgcttgaacccaggaggcagaggttgcagtgagctgagatcgtgccactgcactccagactgagagacagaacaagacttcgtctcaaaaaaaaaagcgagagatttgatcgccttgaccttctgaagtgctaggattaaagatgtgagccctcagtcaggctttttttttaaatgtattttttattttttagcaattctcatgcctcagcctcccaagtggcttgagattacaggtgtgccaccatgcatggctaatttttgtatttctagtacagatggggtctcaccatgttggccaggctggtctcaaactccctacctcaggtgatccgcctgcctcagcctcccaaaatgctgggttacatgcttgagccaccgcccctggccctggtcaggattttgagtttagatccatgaaagtgtcgccacgtccctgctccctgcaggagggaggcctgtgggactttctgctctggctgtttacaaggctttgcttctggtgcctaaggctggaaccttctctctgcaggaggagataagcaaggacctcagagccacactgaacgccttcctgtaccacatgggccaacacagcaacaagtgagggagcccctcgggtcctgagcccccgggcagggctgtgcagccgtcgcccttggttcccactgagggtccctggctcacagtgctgggcaccagctgtggcctcagtgtgcccacctcagatgtcccctgggaacggcccagctcgggacagcacggggtgtcattgaggaacatgcaggggcctcccgggcagagctggggtcagtcctgtcttcacggccctgtgcgccgccgccccagcttgcaggtccctctgcccctagatttctgcggtcctgtgcctgcaagggaggtggtctgattgctgccgcccagaggtccccagtagggtgaccggccctatgtccaggctccctcttccctcccaaatcccttaattttgagttttcttggtctcctgggcccctccagccccagtcacgtgtcacacggaggatcaagtcctgctggtcggccgtggctgactcttcaggcacgttgggctcctgggtcagctgctgccgttcgacgctccctggagccctgactcaggtccttcccagagaggcaaggctggggccctgctgagcctctgctgaacccgggcccccgaggtcctgcttctggctcgcatggccataatcttgacagggactctgggtcccgcatccctgctcccagcacagcggggctcaggtagcaggagggagtggtgttcccggcactgcctatcaggctgggcgagggtcagcggggaagtaccacacagggcaagaacagaggcccgagaagccgggcggggggcagctgggcgtggtggggcaggcaggcgggtgaccagggctgtggctgcgttctccccatgtttcctgtgctcacaagctgccgctttagattctcccaaaaagtctccccgagggggctgaggagcccccgttgccctcggggcatctcagctggcagccccagcgtttccttccccatccctgtcctacagattcatgctggtcctggccagcaatctgcctgagcagttcgactgtgccatcaacagccgcattgacgtgatggtccacttcgacctgccgcagcaggaggagcgggagcgcctggtgagactgcattttgacaactgtgttcttaagccggccacagaaggaaaacggtgagtgtcccgcctcacccggcccccaatccaggcaccatatggcatgggtgtaggccagctgcctgtcttccggcctccacctcatggtgtggggtccgcggccttggctgcctcacttgggaactccttccccaggcgcctgaagctggcccagtttgactacgggaggaagtgctcggaggtcgctcggctgacggagggcatgtcgggccgggagatcgctcagctggccgtgtcctggcaggtgagtcaggctccggcacgtccacccagacgggaccccagctgctgtggagatgctcagttgcgccaggcctgtcccagcaccggtgtcatgtgggagcttctgttgaggggttttcagtgcacagacgtgacacagggccccctgcctcagtcgggccactccacgcagcagcgtgcacctgctcgtgccctcaggagggtggggccatgttggttgctgacagtcacacggggctctctggaagccagtccagcatcccaggtgcccgggctctgctgggtgtggtgggaggtttctggctctcatcttggccaacaggcacctcctagagggaatggtcgtcaggacaggccccgtgtgagttgggtggtgggggtggagggacgttgtgtttcctggaccaggtcccttggcttggtcctgtttgacgggttcagacacacggtgggactggcctccgattgtcccacagttagttgttcctcggaggcacccctcctgctgctccttggatactccagggccgaggagccgagactcactggagtgtgggcatggccatccagagagctctgatcaggccgggcgcggtggctcacgcctgcaatcccagcactttgggaggctgaggcaggcatatcacggggtcagattgagaccatcctggccaatatgtcgaaaccccgtctctactaaaaatacaaaaattagctgagtttggtggtgcatgcctgttatcccagccacacgggaggctgaggcagaagaattgcttgacccggggagttggaggttgcaatgagccaagatcgcaccaccgcactccagcctggccaaagattgagactccatctcaaaataaaagaaagctttggtctttgggggttgctgaaaaagcaaaaccaggtctgtggggtagaaggcgccctggccacacacaggcattgccgcctctggggtccgcagagtctgtgtgacaacctggtcactcgatctagcagcgtatttgaatgaatgagtgacagcttaatgaagtagccaagtaccttgatttgaacgtaggagccggggtatgtagggagctgtattagtcagtacaggctgggttatgccgctgtgacaaagagtcccagatctcaaaccccgtccttgtgggtcagctgaggtctctgttccaggccgtccccacttggaaccaggtctgtttccacaactcagaaagtggaggctgggtatggtggtggctgacgcttgtattcccagcatttggggaggccaagtcagtcagattatttgaagccaggggttcaggaccagcctggaaagcaaggtgagaccccatctctacaaaaaatgaaaaaattggccggacctagtggcacatgcctgtaatgccagctgcttgggaggctgaggtgggagggtcacttgagtccaggaggcggaggctgcagtgagctgtgattgtgccactgcactccagcctgggttacagagcaagaccctgtcttaaaaactgagaataatttggaacaagcccggtggctcactcctgtaatcccagcatgttgggaggccaaggagagaagatcacttgaggtcaggagttcaagaccaccctggccaacatgatgaaccccacctctacaaaaaatacgaaaattagctgggtgtggtggtgggtgcctgtaatcccagctactcaggaggctgaggcaggagaattgcttgaacccacgaggcagaggatgcggtgagctgagatcatgccactgcactgtagcctgagggacagagtgagactgtctcaaaaataataataagaagaataataatttgggctgggcacagtggcacatgcctgtaatcccagcactttgggaggccgaggtgttggatcacttgaggtcaggagttcgaggccagcctggccagtgtgccgagaccccacctctactaaaaatacaaaaattaactggacggggccgggtgtggtgacttatgcctctaatcccagcactttgggaggccgaggtgggcggatcacggggtcaggagttcaagaccagcctggacaacatggtgaaaccccatctctactaaaaaataaaaaaattatccaggcgtggtggctggcgcctgtagtcccagctactcaggaggctgaggcaggaggatcgcttgaacccgggaggtggaggttgcagtgagctgagatggtgccactgcactccatcctgggtgtcagagcgatactccatctccaaaaaaaaaaaaaagaaagaaattaacctggtgtggtagcaggcacctgtaatcccagctgctcgggaggctgagtcaggagaattgctggaactcaggaggcagaggttgcagtgagctaagatcacgccacagcactccagtctgggcgacagagcgaaactgtctcaaaatataaatgataacagtaataatttggcttggcacggtggctcttacatgtagcattttctacacataagattatgtcacctgagaacaggtgattttacctctcccttttcagtttggatgacttttctttttcttgtcccatatctctggccagagcttccagcgatatgtggaatagaagtggtcagaattcttgcttggttctttctcagaggaagctttcagtttttcaccactgagtatgttagctgtggacttgtgatcgctggccttctttgtgtttagggcatgttcttcaatcctggtttgttaattttttttgtttcttttcttttcttttggtggggggaccagtctcgcttttgccgcccaggctggagtgcagtagagacagggtttcaccatgttggccaggctggtctcgaactcctgacgtcaggtgacctgcccacctcagcctcccaaagtgctgggattacaggtgtgagccactgcaaccgaccagttgaattttttttttttaatcataaaagtgtgttgaattttgtcaaatgcttttcctgcatgagatgagagggtcatgtggtttccttcctccactctgctaatattgattgattttcatatattgaactatccttgcattccaggaatgaatcctgcttggttagggtgtagagtcctttaactatactgctaaattcgttttgctggcattttgttgaggactttcccagtgaggctcatcagggatattggcctgccatttctcttgtggtgtgtttgtctggctttaatatgagggtaatgctggcttcctaggatgagtgaggaaatgttcttcaatttgtccaagagtttgaggagtggtactgattcttcttaatgttttgtgaattcacatgtgaagaaatcaggtccaggtcttctctttgaccttttatagcttgaagatcttaggttcccagaaaaattgcaagggtagcacagagagctcccgggcccggggccttcccacatggtgaacatcatgtgtcactgttggacccacccgcgaccaggttttgccccagaatcccacccaggaggccacgtgacatttagctgtcacttctggtgggctcctgccaggtcccgtgcttcctggaggggtggccctgtgagcatctgcgtagcccctctcctctgctgggccctgggtgacgtgcagccactcgggtggaccctgagggtccctgcacctgtttgccctctcttgggtgggctcaagaccaaaaatgatgttgagcagtcctgggcccctgagccacagtggcggtgcggctccggtcagtgtctcctgcgctcccgggcccccgacccacagtggcggtccggctctggtcagtgtctcctgcgctcccgggcccccgacccacagtggcggtccggctccggtcggtgtctccccacacagtggctcttggcgaggggtgggcgctggcagaggggacgggcaccacgtggtcatccccatgacaggttctgtcatggtgacagtgttgtgggaggatggtgtgctgctgcccctgcaccccgtgagatgaatcctgcctctgggaggtacagctgggacggggcgagggacccactcagctgtccaggaagggtcccctgccctgtgcttcctccaggtgtcctggtgcactcctgagcacggcacctagtgggggtccccacaccctcaccctgacccatgggtgcctccccttggggactccacgcccttcgctggcactgagatggagagcgacctgtccgtggcagaagggctgctgcacctgaggtgcctaaggcgacaccaagggccacagccccagtagctccagcctccgtgtgctcaatgccaagccctgtgcccaggaggacagggaaatggaggcagaggtggccttgatgtcccaaggtgggcagtggctgcctctgccctggaggcctgtgagggtcagggtctgagggtctgaggtgcactatgacccgggggcactgcctggccacggctgagactcgcagagggtctgcagttcccacctgcctctcggaagctgccctgggtcagccgtcagtggtgctccgccttgggttttctattatcagaaagtcattgagcaacagcagtgctgaggacgcaggcagggctgtgggcactgcaggggccgctcccagtgtccacacgcgtgctgggctctgccaaggtgtgggaagcctgtgtttcaccctgaggttgtcctggtgcccctggtttggcccctccccacctcggggccctggcgtgcattaagggtggcgggttcccatagcggcctccctcagctccctctctcttcactaggccacggcatatgcctccaaggacggggtcctcactgaggccatgatggacgcctgtgtgcaagatgctgtccagcagtaccgacagaagatgcgctggctgaaggcggaggggcctgggcgcggggtcgagcaccccctatccggagtccaaggcgagaccctcacctcatggagcctggccacggacccctcctacccctgccttgccggcccctgcacatttaggatatgctcctggatggggactgggctgtgcccagggcctctgtcccccaggatgtcttgtggtggcggtcggccgttctgccccccagggcaccccctgttgtaggcactggctagggaggggcaggcctccttcctgcccctcgagacactcttgggagatgcattttccgtctggctcacagggggagggtgaggctttgtaccccagcccctgcccaggccactgtgagggtgggtgctggctgagcccctggggcagaaggagtggggcaggcggggtctttgttctcggctcccacagcagagccaggtgagggggggcctgccaggactagacagaagtggggcggcctgaaccctgcttccagccatggccaggggccacggaacccggcaggggtgtctgaggccgccctgtcagctggccggtccaagcctgtggctggagctggtgtgtgtttatctaataaagtcccacaggtgcctcacc

SEQ ID NO: 375 - DNA, 24533 bp, Homo sapiens
ccggctgcggcgcgtggagctgctcccagccgcgctcgagtcagactcgggtgggggtcccggcggcggtagcggcggcggcggtgcgagcatgtcgtggctcttcggcgttaacaagggccccaagggtgaaggcgcggggccgccgccgcctttgccgcccgcgcagcccgggccgagggcggggggaccgcggcttgggagaccgccggcgcccaaggacaaatggagcaacttcgacccccacacaaaaaataggaccaaggcggcgcgcgagctggagcactcgcgtgagtgcggcggggcggggcgggcgggcgggcgggacgggccggggaagcgggagccctggccttgccgctcctcgctgctgtcggcagccacttcccgggcgagactgcgcccccggagcaccccccgccggagccgtctcgcgtgccgggaggatcggactctttccgtcacccgtttgcacctctgcagctgtcaggagcgggtcaggtgcgaaaagcggtgcggaggtggcgctcataggttacaggggtcagggtctggggctggccgtggtcttcagttaccgccgagcgtgcgggatccttctgcgcttgccgcctccacgtggcacaggccaaggcgtggccagatgggtagatgggtttgttgggtggttgctagcagtttccacgtaacaagggaagcgtatttgagagttacttgattctaacgagactagcagatttgcacttcttgttggaagacgttagcatttgcacggcgaggtctgtgaagcacaggccaggccgtgctgctcagcttgagtaaacccctgacccaaggccctcagggtgtgagcactgactgcaccttccctaagctcgggtctcttcccccagccttcctttcccctgtggctttaacgatttgtagcacgatgcagttcaaatggctaggagtctggaacgtagaaggtgctgaattcattgaaagaatacagtggttctcaactcttgtttaagccggggttctttctatttatttatatattgagacacagtatcgccctgtcgccgaggctggagtgcagtggtgcgatttcggctccctgcaacctccgcctccgattctcctgccgcagcctctcgagtagctgggattacagccgcgcagcaccacgcccggctaattttttttgtatctttagtagagacgggtttcaccatgttggccagggtgctctccaactcctgacctcgtgatccgcccgccttgtcctcctgaagtgctgggattacaggcctgagccacagcgcccagacagaagggattccttttttttttttttttttttttttttgagatgagtctcgctctgtcgcccaggctggagtgcagtgacgtgatctccactcactgcaagctccgcctcccgtgttcacaccattctcctgcctcagcctcccgaatagctgggagtacaggcgcccgccaccacgcccggctaattttgtagagatggggtttcaccgtgttagccaggatggtctcgatctcctgacctcgtgattaattttttgtatttttagtagagacggggtttcactgtattagccagggtggtctcgatctcctgacctcgtggtccacccgcctcggcctcccaaagtgctgggattacaggcgtgagccaccgcatgccacctttttttttttaagatgatgtcttgctctttggccaggctggagtgcaatggcgccatcttgtctcactgcaaaccgcaacgccctggttcaaagaattctgctgcctcagcctcccaagtagctgggattacaggcacgcgccaccacgcccagctaatttttgtatttttagtagagacgtggtttcaccaccttggccagggtggtcttgaccacctgaccccgtgatccacccgcctcgacctcccaaagtgatgagattacagtcctgagccaccgcaccttgccagcaggggttcctttttagaaagaagatcatttagggaatccctggtgtgaagcagatataaacagagtttccctgtttaaggagggatggcctggtggtacttgtggttccatcctgtgcccttccccggggtgctggggaacatcctgagctgaggtttctggccccggctgggtctcataaccccagagggacattcaggtttgggcccaggcccaggctaacatggatagtcctagctgggcaccaccgacagtgcgtgttctgttttgaagagatggggtcttgctttgtcgcccagtctggccttgacctcctgggtaaaagccgtccaaccgtctcagcctcctgaggagaggggactgcaggcttgctcggtaatttttcttttttcttttctttttttcttttttttttgacggagtctcgctgtcgcccaggctggagtgcagtggcgtgatcacggctcactgcaagctccacctcctgggtacacgccattctcctgcctcagcctcccgagtagctgggactacaagtgcccgccgccacgcccagctaattttttgtattttttttagagaccggttttcaccatgttagccagaatggtctcgatctcctgaccccgtgatccacccgcctcggccacccaaagtgctgggattacagacgtgagccaccgcgcccggctttgctccgtaatttttctgtgtgtttttgagactgagtctggctctgccgcccaggctggaatgcagtggcatcatctctgctcactgcaacctttgcctttggggttcaagcgattctcctgcctcagcctcccgagtagctgggatcacaggcgcccgccagcacacctggctaatttttgtgtttttttactagagacggggtttcaccatgttgtttaggctggtcttgaattctggcctcaggtgattcgcccacctcggcctcccaaagcgctgggatgacaggcgtgagccgctgctcatggccttcctcggtaattttaacgatcaggttaggatgggaatcaagggctggacttcagggcacctcggaggacagcggatgttggtgactgactttcttgctgcaggcttatttggagggttcctttgtgtcctagttcctgggggttttcacccgctaacttcacttagagattgaaacttctcccacttccagaagctgaatcgtagtgatcagcctgcggccccctgcagtggtacaggcctggttgagcagcctcaggccgcctccccatagtgcagacctgtgcctctgagttgctccagtcctggcggccccggagctcctgacccgcagtccgctctgccggcgttgccagtgccttggtctgccctctctgtggtggagcggggcccggggcagggtctccaggtgcaccgtggggagccctccatcaggcttttgtttcctgtggattgtgttccaggtgtgggctctttcattttgatcccttctctccttcctggcctcactgctggcgggtgagagaggtttctccggagttgactgccccctttccccgggtgccccctgccctgcccctctgcctggtagcccctctgcaagcccggcccctcccgacgctcctggcttcctccgtgcccctttcctggcagcggggtcgccgagattcgcccgttgctttgtccttgctgctctccaggcaaacgggcggctcctcctcaccgactgcctcctctgtcccttgaggctatagccccatgccgcctcgttcccagagtctgccctgacccctcctccggcctgtccttggaagtcacagcagtacattatcccagaactgtctgtgagcaccagcgctcgccctgcactccacagagggggtgcctggaggagagcctcgtgccctgtgggtgtgaattcacgcgctgggacgcacgtccctggcacagggtcacaccaaagtggtgaatgattgttctcattctaataaccgagaggccacacgggcacctgacctgctctttcccctctcctcctccccagagtcactgggggtgggaactgtcaatgagccattttcaggggagggagtggcctcagcttaatccagccaaaggtcccctcgggaggaaacaggcagagctcctcaccgtgacacccacgttcctgtcactgctctgtggcaggaccctgggggactgacacaccctcagtcccctcggggtcagagtgagagtggttgagagcccggggtcgcttcagcccttggcttcccgagcttagcagccaaacccgttgacctggcactgtcttccctgagaggcaggtcccggtctcatctgtgctctgttcactggggcccccgaggttagctaccaaggcgcttcctgaaatgtgacgctgatgcccgtcagcccagttcgtgcctaaccacaggcccaagcagacccaccccaacaccaaagcgtcgctgcctctgtctaaatgcaacgagtgctccccacggcacttccccctgcgtcagtcacctccaaaaattacacctgagctgagaacagacgctgggctctagttagtgacgtgtttgctgcagttgactctgaaggcttaaaaaagtgagacgggctgcgggaggaagagagacgggaacaacgcaccaacccaggagcatcgggggtccctgcctactttacacgtctttctgtgttagaataatttttttttttttgagacggactcttgctgtctcccccgctggagtgcattgcttcgatctctgctcactgcaagctctgcctcccaggttcacgccattctcctgcctcagcctcctgagtagctaggactacaagtgcccgccgccacgcccggctaattttttgtatttttagtagagacggggtttcactgtgttaaccaggatggtcttgatctcctgacctcatgatccacccgcctcagcctcccaaagtgctgggattacaggcgtgagccaccacgccctgctagaataatttttttttagagacggagttgcgctctgttgccccggctggagtgcggtggtgcgatctcggctcgctgcaagctctgcctcccaggttccagcaattctccagccttggcctccccagtagctgagatcacaggcgtgcaccaccacacccagcttttttttgtgtttttagtggagacaggatttcgccatgttggccaggttggagattttatttttcttaagtctcactctgtccagctggagtgcagcagtgtgatctgggtgactgtagcctctgcctccggggttcaagccatcctcccacctgagcctcagagttgctgggattacaggcgtgaaccaccgcttcccactaggtttttgtatttttagtagaggttgggtttcaccatgttggccaggctttggtatccgtgtatcctacacctgctctccgtgccacatgcgcccgcaggttacgccaaggaggccctgaatctggcgcagatgcaggagcagacgctgcagttggagcaacagtccaagctcaaagtgagtggggccggtgtgggcgaggaggccggggcgcacatggggttcaggcgtggagattggtggggctgctactggtgggtagggccaggggcgtgtacatgggcagcagtggggccagggccgagcttgggcgcctcatttcacagagggaaacaaggggaggtgagagacgctgccacagagccgcccgagagggagggtcagtgttggtgagggcgtctggtcgtcctgagggagggccggtgttggtgagggcatctggtcgtcctgagggagggggtcttcttcacattctcacctcatttcttttcactcagcaggattttttattttattttattttattttattttattttattttattttattttatttattttgaaacggagtctcactcttgcctaggctggagtgcaatggcgcaatctcggctcactgcaacctccgcctcccgggttcaagcgattcatctgcctcagcctctggagtagctgggattacaggcacgcgccaccacgcctggctaatgttgtattttagtagagacggggtttctccatgttggtcaggctggtctctaactcccgacctcaggtgatccacccgcctcggcctctcaaactgttgggattacaggcatgtgccaccacgcctggctaatgttgtattttagtagagacggggtttctccatgttggtcaggctggtctctaactcccgacctcaggtgatccacccgcctcggcctctcaaactgctgggattacaggcacgcgccaccacgcctggcctattttattttattttgagacagagtgtcactctgtcccccagtctggcgtgcaatggtttgatctcggctcactgcaacctccacctcccgggttcaacctcctgcctcagccttccgagcagctgggactacaggagcctgccaccacatctggcgaatttttgtatttttagtagagaagggggttcagcatgttgtccaggttggtcttgaactcctgacctcaggtgatccagccactttggcctcacaaagtgctgggattataggcaagagcgatggcgcccggcccactcagcaggattcctagaatgggcacgagctctgccctcatcacagtccaaaagtgagcacctgcctggagctgcccagaaacagccttgtggggtggggttggtgtctgaccttcctccccgggggccttcgcaggcttctctgctggtgcttctgtgcctgtgggtctggattcctccagggcctgatcctgggtgcagatgcagctggaagccctgaacctgctgcacacactagtctgggcacggagtctctgccgtgccggagctgtgcagacacaggagcggctgtcaggcagtgccagccctgagcaagtgccagctggtgagtgctgtgctctgcaggagtatgaggccgccgtggagcagctcaagagcgagcagatccgggcgcaggctgaggagaggaggaagaccctgagcgaggagacccggcagcaccaggccgtaagagcgcaagaggccgcgagggaggcgcccggctgcggggagcggcctggggcaggactgggagctgggtgtggtcccggggcactctggagtcagccattagagctgccctcggaacggccttgcacaaacgcctaagacctgtaaggtccctcactgctgagccggacgggaggtccccgcgcctccccacgtttgtgtgaggctgatggcgcgtcggagtccccggcgctccgcccagtcggcccagactgcagctcccggctgagatgtgtctttgccgccctcttctccccagagggcccagtatcaagacaagctggcccggcagcgctacgaggaccaactgaagcagcaggtgagctcagcctcccctgcgaggcgcctgcgtccctgagaacgtaggtggctttgtgggaccagtcagtgggtcagaggccacggggcaagaacgctggggttgctgacggtgggtgctagagcaggggaaactactcggacagacacgcaccagcacacgtgtacaggcacacatgcagatgtgtgcacacatgtacacggagacacaggcacctgcccacacggacacacactcctcgcacacacactcccggcagacaggcacacacacccctgcacacatgggcacacacacacccctgcacacacgggcccacacactcccctgcacacatggggaaacatgggcccacacacacacacccctgtgcgcacacacccctacacaggggcatggacagacacccgcaaacacacccccacacaacacgggcacgcacacacacaccccgccacaacacaggcacacatacccctgcacacaggcctgcacatacacccccacacaggggcatgctcacgcagcccgcacacacacaggtatgcagacacacccaaacacacatgggtccgcaggcacacactcccgcatggggcatgcacgcaccccccacacacacccgatcacacataggcatgcacacccctctgcacacatgggggcttacacacccccccgcacacgtgggcccgctcacacagcccacacacataccccttcacacaggcacacaccgccccgcacacacgggcctgcacacacacccccacacgggcatgcacacgcccacacacacgggcgcgcacacacccggacatgcacaaacacccacctgcacacacgggcacaccccaccacacacacacacaggcatggacacacgcacaccccctcacacataggcacacatacacaacccaggcacacacccccttgcacagacgggcacgcacacagtcccacacatgggcacacgcgcacacccccgcaaacacacacacgggcacgtgtacgcacccccactcacagtgtgcctcatacatacgggcacgcacctgcacacgagggcacacccccaccccccacccccacacacccccgcacccatgggcacacacacattactgcacgtgagggcatgcacacacacgccctgcacacccccacacacagaccccttgtgtgggttccacagcagcggctctccaggcacgacaagcctccttgtctcccacccgggcgcccagctggcagtctgggaggttctgcttgggagggctggtcagtggcggcgggcgggtctctgggtctatgagaaaagcttgggtgacatctgttccctggtccttagggaccgtcaccttcagtcctgagctcgcaggcggggttcacatgttgcctgttgtgggcattgtagctttaacgtttaattggcggaagacagaagcttccttaagcccagcctgaatcagggcagtggtgttgggaggtcggcccgcggtggcccttgtcagggaagccacagtgggggctgtttctgccactggggagtttgggaccctgaacccatcccctcagtgactgccgtcccagccgatgtcacccgtgtctgtgtcagggtgcggcgtctgcaggtccccaggtgcccaggacgcttggagttctgtggtcctggggcggacgcaacctctggattggtgttgagcatttttctggttttaaaggcttttctctttttctgcggcttcttctcagcaacttctcaatgaggagaatttacggaagcaggaggagtccgtgcagaagcaggaagccatgcggcgaggtaggctgtctgctctcctggctggggcggaggtggcgggggctgcttgtggacccggcgtgcactctgagcctgagttctgccgcccggcccctcatagctaccagtgcagtgggcgaggcctgctggggctccgcggggtggggctgcctctcggaagacacctctgtctgcgagtggacgccaggatctgttcagggagggcaggagctgcttcacttcatgggaagtacaggggcctttgttttttttttgagacggagtctcgctctgtcacccaggcaggagtgcaatagcacgatctcagctcactgcaacctctgcctcccaggtttaagcaattctcctgcctcagcctcccgagtagctgggattataggctcccgccaccacgcccagctaatttttttgtatcttcagtagagaaagggtttcactgtgttggccaggctggtcttgaacttcttgatctcattatccgcctgccttggccttccacagtgctgggattacaggcgtgagcctctgcgttctgcctagaacatgggtctttactgtcctggtttcagtggggatcacaggtatttggtgccatgtggcatttgttggcgagtgctccaggcaaacgtctgtcaccactcttcactgtgggtgggcttgtggcgaggtgtgtgcgtttaatgttcagtagccaggcacgtggcacgtcacgcgtgtctgagttctgacagctgtgtttctgtgtgaggggggcttccttcagaactccgcgttctggttttttgcttcaaagagctcgtcctgagaagttgcctaggcctctgggtcggatttctgccctaatccatgggcagggccggcctgtggcgctgtccctaccaaggtctgtgtgtgtctgtggcacgggcctgtccatggactgggcttgtccgtggagtgggtcggtccatggccttagcctgttggtggcgtgggccggtccacggcatgggcctgtctgtggcgtgggccggtccgtggtgtgggcctgtccgtggccttagcctgttggtggcgtgggccggtccgtggcatgggcctgtctgtggcgttggtctgtccgtggcgtgggccggtccgtggcgtgggccggtccacagtgtgggtggaggtggacgtgctgcactgcatggtgctgagctgccctacctctctggggcagccaccgtggagcgggagatggagctgcggcacaagaatgagatgctgcgagtggagaccgaggcccgggcgcgcgccaaggccgagcgggagaatgcagacatcatccgcgagcagatccgcctgaaggcgtccgagcaccgtcagaccgtcttggagtccatcaggtgagcactgccgaggcccgggccggccacagatggagccccgcaggtgtgagtcgctggtcccagggcgctctccagctcttccaggcctggccgccgtaggctgactccttggtgggggcactgcctcctgtcctggcaaggccgtgccgccatgtcagggcctcaccctcaacctgctctcgctgcgtggtacggatcttcgtgtccttcctggtcacaccactgctttccccgcaggacggctggcaccttgtttggggaaggattccgtgcctttgtgacagaccgggacaaagtgacagccacggtaaacatactcataaaacagggctggcaggtggctgagaggcagcatgtgggggcctcctggagccccaggtcctgtccctgccggctctgcacagccctgtagctctcccagcacagagcaaacccacgttgtacctgctgggctcggctgctcctccctccttgagctgggagaaaaaaatgcagttgccagcctgggccacacggtgagaccccatctctacgaagaataaaacattagctgggtgtgatggtggcgcctgtggtcctgctactcgagaggctgaggtaggaggatcacttaagcccaggaggtttgggctgcagtgagccaacattgcaccactgcactccattcttggcgagagaataagaccttgtctcaagaaaaaaatggccaggcggtagtggctcaggcctgtaatcccagcattttcggaggcggaggtgggcggatcacgaggtccggagatcgagatcatcctggtaagagtgaaaccctgtctctactaaaaaaaagaaaaaaaaagaaaaaaattagctgggtgtggtgacatgtgcctgtaatctcgggaggctgaggcaggagaatcacttgaacccgggtggtggaggttgcaatgagtcgagatcccgccactgcaccccaagaccagcatgaccaacatggtgaaaccccatctctgctaaaaatacaaaaattagcaggccaaggtggcgtgcgcctggaatcccagctgcttgggaggctgaggtaggaaaattggttgaacccaggaggcggaagttgcagtgagctgaaaccgcacaattgcactccaacctgtggaagaagagcgaaactctgtctcaaaaaaacaaacaaaataaataagccaggcctggtggctcactggtgtaatcccagcactttgggaggccaagacgggtggatcacttgaggtcagaagttcatgaccagcctggccaacatggtgaaaacccatctctactaaaaatacaaaaattggccgggcctcgtggcacaggtctgtattagctgagtgtggtgacctgagcctgtaatcccagtcactcgggaggctgaggcaggagaactgcttgaacctggaaggcggaggttgcagtgagccaagatggcaccattgcactccagcctggccacagaacaaaaccctttctctaaaaacaaagtcaagggcgcattaagcagctccttcatgttctcaggtgacaccgtctcaccaacatggcaacaccacctgcaacattcaccgtcacactgaccaggccaccggcaggtgctgcagtcacagcagtgggcgccggcaccacggcagagcaagtgcccactcagtgccgggcacctactgtgtgctgggcggggtggggggacggaggacacagccatgtgcgacctggggcgccaccacagcaggccagagcctgggcacaaaagagcgaggctttaaacgagagaagaatctgaacttcaaactctcagggttttattccgaataacgaaagtttttgcgaaatggagtcgggttcgctttctgggtctttgatttttttttttttgagacagagtctcactttcaagtgtgctgctcaagtgcagtggcgcgatctcgactcactgtcagcttcgcctcttgggttcacaccattctcctgtctcagcctccggagtagctgggactacaggtgtctgtcgccacgcccggctaatttttttgtatttttagtagagagagggtttcatcctgttagccaagatggtttcgatctcctgacctcgtgaatccgccgcgtgggcctcccaaagtgctgggattacgggcgtgagccaccgtgctcagccacagccagctaattttttcatgtttttagtagagacgaggtttttccaggttggttaggctggtcttgaactccaacctctggtgatacgccggccttggcctcccaaagtgctgggattacagacctggccagcctaaacgatttttaaaacaagttagagattttgggttagtcttgttttccaggaataaagtaccatttttagtggccaaggatgtaccagagggtgtggccctgtgacatccagctgggtctgcccagggccccgctcagcgaccgaggctttctaggatttatgctgccagttgcagagaaaatggccctgagtgagggcgttatgactgccccacctgcctcctgtaaccgcgtggctgtgggattcggggctgggaattcgggttcctgtggggccagcacacggccctgtgcttctccctcaggcggagagagggtgggggcagccccgtgcgtctcctgctctaggagggagggacggtgggggccggtgcgccagtgcggtgtctctgctgcaggtggctgggctgacgctgctggctgtcggggtctactcagccaagaatgcgacagccgtcactggccgcttcatcgaggctcggctggggaagccgtccctagtgagggagacgtcccgcatcacggtgctggaggcgctgcggcaccccatccaggtagcggcgcaggcctggccctccctgagtgcagttcctggctgagtcccttctgccccacgagcacagcccacgcacaccctcccgtcccttccctttccccggataacaggcacccgcacgctgcttcacgggtgggttttcctgtctggcgctgtaccttaggggtctgcatcagtgagacccttcccctgtctgcctcggtgtcccttgctcagggctcttgatggggcctgggagcacatcggggtccttgcaagacccgggacttgggtgtgcggccgtctgtcggggaagctgctacaggccatggcgtctggtggcctccctggggagccgcgccgcttgccagcccctgaggtgcctgctctccacaggtcactgggtaggtggttaagaaaataaaagccaataaggaaccggaaaatgccccaatcccagcaatagcctcctggtctcccggcggggcagggttccagctccgggccggtcctggctgtgctttggggcagctccgtttctgtgtgttaccgagcatgtgtgtgcgttggtggctgttccgtggctgtggcaggtgacccaatggtgcttccccttcccctccggcaggtcagccggcggctcctcagtcgaccccaggacgtgctggagggtgttgtgcttagtgtaagtcggtgtgcctgggaccggggaggtgcagggaggggaccccggagctgggctgggctgtggcccttgctagcgctcgtggtggcgcccaggagcttttgggtcctgagatgcaactgcttggactgtgccggggatagataggctgcccacgagctgggcggcttcctgaggagcagagtccgcacccgggcattcccgcagcccctgtcaccgaggcttccgtgggtgcagagtgtctcccccaaacccccgtcttccccggcagcccagcctggaagcacgggtgcgcgacatcgccatagcaacaaggaacaccaagaagaaccggggcctgtacaggcacatcctgctgtatgggccaccaggcaccgggaagacgctgtttgccaaggtgagagcgcctggctgaacaggtgggccaggggccgctggggtctcacctgcctgcaggtgtctgggggcctcagccgcctggggaatggaccccccttaggcctttgcctaccctcgtgtaggctcagggtgctggtgtgggcagcagcgcctcccatcttccaggcgggggacgtctcctgtctggcaggctgtggcttccagacagggacacccggcaggggctccacactccaggtggagtgtgcaggctttgcagaggcagagggaacatctgttctgtctcccctcactcttcttgtccagaaactcgccctgcactcaggcatggactacgccatcatgacaggcggggacgtggcccccatggggcaggaaggcgtgaccgccatgcacaagctctttgactgggccaataccagccggcgcgggtgagacgtccccacagcatgcaccaggcccttggctgcggcccagcaggctgccttctgggaagggggtccaggtgtctcttggggaccctgtctttctgcagctctgtccttgtggccacgcaggaggcccaatggagggtccctcggagggaaagtcccctgagtgtggaccctggtggacacgaggtccccagcgtgtggaggctgccagtgggatacttggctcagggcagaagggaggtgggtgggtgcagggggagaggggtcttcacagctgcaggggaggctcctccacagccgccctccccccaacacgcctgcaggtgggcgtgggcactggttgccttttctagaaccatttgaaagttagctgaagacagcatggcacactcccttcaataggtcccacagtgaccccgcgcagggcacagcccgggcacccttgtggcctcggctgtcctcgttggaaccacgatcctcatggttggcaccctcccctctggcctttgacctttcactttagaagacctgtccctgcgccaggcgtggtggctcacggctgtaatcccagactttcggaggcggaggcaggcagatacgaggccaggagattgagaccatcctggctaacttggtgaaaccccgtctctactaaaaatacaaaaaattagccaggcatggtggtgggcacctgtagtcccagctactcaggaggctgaggcaggagaatggcgtgaacccgggaggcagagcctgcagtgagccgagattgcgccactgcactccagcctgggagacagagcgagactctgtctcaaaaaaaaaaaaaaagaccctgctccttgcgtggactcttgagcactgcactgggtcgctgtgtgggtgaaacctgcagggcggaggctgttgccccatgtgtggttggctggtgtgtgggtgaaacctgcagggcagagtctgttgccccctgtgtagttggtttcccactgccttctgaggctgagacgtggtcagctgcccagaggccaggctgatcggcttctgtcgagtccaggacttagggctcctgatggggcagagcctgaccccgtggggatctgcctgcctggcctgctcctgccgcggccggacgctgctgtgggctgctcctggcgtcactctcgccttgcttggcctctctctcgttcacagcctcctgctcttcatggatgaagcggacgccttccttcggaagcgagccactgtgagtgtcactaagcctctgtctggccacaggagggtggtcgggtgggcgcggctgtcatcctgggccaggctgcagcccttaagctggcttgcagtggcgcaatcttggctcgctgcaacctctgcctcctgggttcaagctgctctcctgcctcagccccctgagtagctgggattacaggtgtttgccaccacacctagttaagttttttgtatttttagtagagatggggtttcaccatgttggtcaagttggtcaagaactcctgatctcaaatgatctgcccacctggcctcccaaaatgctgggattacatgcgtgatccaccacgcccagccatacagttattattttaatacagggtgtctgtcgcccaggctggagtgcaggggcgacatctccagctcaagcagtcctcctgcctcagcctcccgagaagctgggattgcagaggcacactaacacgcccggctaatttttttgtaacgttagtagagatggagtttcccacattgtccaggcagggctcaaacttctgaactaaagaaattcaccggccttggcctggcacagtggctcacgtgtgtaatcccagcactttgggaggccaaggcaggtggatgacgaggtcaggagttcaagaccagcttggtcaatatggtgaaaccccgtctatagtaaaaatacaaaaattagccgggcgtcgtggggcacgcatgtaatcccagctgctcgggatgctgatgcaggagaatcgcttgaacccaggaggcagaggttgcagtgagctgagatcgtgccactgcactccagactgagagacagaacaagacttcgtctcaaaaaaaaaaagcgagagatttgatcgccttgaccttctgaagtgctaggattaaagatgtgagccctcagtcaggctttttttttaaatgtattttttattttttagcaattctcatgcctcagcctcccaagtggcttgagattacaggtgtgccaccatgcatggctaatttttgtatttctagtacagatggggtctcaccatgttggccaggctggtctcaaactccctacctcaggtgatccgcctgcctcagcctcccaaaatgctgggttacatgcttgagccaccgcccctggccctggtcaggattttgagtttagatccatgaaagtgtcgccacgtccctgctccctgcaggagggaggcctgtgggactttctgctctggctgtttacaaggctttgcttctggtgcctaaggctggaaccttctctctgcaggaggagataagcaaggacctcagagccacactgaacgccttcctgtaccacatgggccaacacagcaacaagtgagggagcccctcgggtcctgagcccccgggcagggctgtgcagccgtcgcccttggttcccactgagggtccctggctcacagtgctgggcaccagctgtggcctcagtgtgcccacctcagatgtcccctgggaacggcccagctcgggacagcacggggtgtcattgaggaacatgcaggggcctcccgggcagagctggggtcagtcctgtcttcacggccctgtgcgccgccgccccagcttgcaggtccctctgcccctagatttctgcggtcctgtgcctgcaagggaggtggtctgattgctgccgcccagaggtccccagtagggtgaccggccctatgtccaggctccctcttccctcccaaatcccttaattttgagttttcttggtctcctgggcccctccagccccagtcacgtgtcacacggaggatcaagtcctgctggtcggccgtggctgactcttcaggcacgttgggctcctgggtcagctgctgccgttcgacgctccctggagccctgactcaggtccttcccagagaggcaaggctggggccctgctgagcctctgctgaacccgggcccccgaggtcctgcttctggctcgcatggccataatcttgacagggactctgggtccgcatccctgctcccagcacagcgggctcaggtagcaggagggagtggtgttcccggcactgcctatcaggctgggcgacggtcagcggggaagtaccacacggggcgagaacagaggcccgagaagccgggcggggggcagctgggcgtggtggggcaggcaggcgggtgaccagggctgtggcgcgttctccccatgtttcctgtgctcacaagctgccgctttagattctcccaaaaagtctccccgagggggctgaggagccgttttgccctcggcgatctcagctggcagccccagcgtttccttccccatccctgtcctacagattcatgctggtcctggccagcaatctgcctgagcagttcgactgtgccatcaacagccgcatcgacgtgatggtccacttcgacctgccgcagcaggaggagcgggacgcctggtgagactgcattttgacaactgtgttcttaagccggccacagaaggaaaacggtgagtgtcccgcctcacccggcccccaatccaggcaccatatggcatgggtgtaggccagctgcctgtcttccggcctccacctcatggtgtggggtccgcggccttggctgcctcacttgggaactccttccccaggcgcctgaagctggcccagtttgactacgggaggaagtgctcggaggtcgctcggctgacggagggcatgtcgggccgggagatcgctcagctggccgtgtcctggcaggtgagtcaggctccggcacgtccacccagacgggaccccagctgctgtggagatgctcagttgcgccaggcctgtcccagcaccggtgtcatgtgggagcttctgttgaggggttttcagtgcacagacgtgacacagggccccctgcctcagtcgggccactccacgcagcagcgtgcacctgctcgtgccctcaggagggtggggccatgttggttgctgacagtcacacggggctctctggaagccagtccagcatcccaggtgcccgggctctgctgggtgtggtgggaggtttctggctctcatcttggccaacaggcacctcctagagggaatggtcgtcaggacaggccccgtgtgagttgggtggtgggggtggagggacgttgtgtttcctggaccaggtcccttggcttggtcctgtttgacgggttcagacacacggtgggactggcctccgattgtcccacagttagttgttcctcggaggcacccctcctgctgctccttggatactccagggccgaggagccgagactcactggagtgtgggcatggccatccagagagctctgatcaggccgggcgcggtggctcacgcctgcaatcccagcactttgggaggctgaggcaggcatatcacggggtcagattgagaccatcctggccaatatgtcgaaaccccgtctctactaaaaatacaaaaattagctgagtttggtggtgcatgcctgttatcccagccacacgggaggctgaggcagaagaattgcttgacccggggagttggaggttgcaatgagccaagatcgcaccaccgcactccagcctggccaaagattgagactccatctcaaaataaaagaaagctttggtctttgggggttgctgaaaaagcaaaaccaggtctgtggggtagaaggcgccctggccacacacaggcattgccgcctctggggtccgcagagtctgtgtgacaacctggtcactcgatctagcagcgtatttgaatgaatgagtgacagcttaatgaagtagccaagtaccttgatttgaacgtaggagccggggtatgtagggagctgtattagtcagtacaggctgggttatgccgctgtgacaaagagtcccagatctcaaaccccgtccttgtgggtcagctgaggtctctgttccaggccgtccccacttggaaccaggtctgtttccacaactcagaaagtggaggctgggtatggtggtggctgacgcttgtattcccagcatttggggaggccaagtcagtcagattatttgaagccaggggttcaggaccagcctggaaagcaaggtgagaccccatctctacaaaaaatgaaaaaattggccggacctagtggcacatgcctgtaatgccagctgcttgggaggctgaggtgggagggtcacttgagtccaggaggcggaggctgcagtgagctgtgattgtgccactgcactccagcctgggttacagagcaagaccctgtcttaaaaactgagaataatttggaacaagcccggtggctcactcctgtaatcccagcatgttgggaggccaaggagagaagatcacttgaggtcaggagttcaagaccagcctggccaacatgatgaaccccacctctacaaaaaatacgaaaattagctgggtgtggtggtgggtgcctgtaatcccagctactcaggaggctgaggcaggagaattgcttgaacccacgaggcagaggatgcggtgagctgagatcatgccactgcactgtagcctgagggacagagtgagactgtctcaaaaataataataagaagaataataatttgggctgggcacagtggcacatgcctgtaatcccagcactttgggaggccgaggtgttggatcacttgaggtcaggagttcgaggccagcctggccagtgtgccgagacccccacctctactaaaaatacaaaaattaactggacggggccgggtgtggtgacttatgcctctaatcccagcactttgggaggccgaggtgggcggatcacggggtcaggagttcaagaccagcctggacaacatggtgaaaccccatctctactaaaaaataaaaaaattatccaggcgtggtggctggcgcctgtagtcccagctactcaggaggctgaggcaggagaatcgcttgaacccgggaggtggaggttgcagtgagctgagatggtgccactgcactccatcctgggtgtcagagcgatactccatctccaaaaaaaaaaaaaaagaaagaaattaacctggtgtggtagcaggcacctgtaatcccagctgctcgggaggctgagtcaggagaattgctggaactcaggaggcagaggttgcagtgagctaagatcacgccacagcactccagtctgggcgacagagcgaaactgtctcaaaatataaatgataacagtaataatttggcttggcacggtggctcttacatgtagcattttctacacataagattatgtcacctgagaacaggtgattttacctctcccttttcagtttggatgacttttctttttcttgtcccatatctctggccagagcttccagcgatatgtggaatagaagtggtcagaattcttgcttggttctttctcagaggaagctttcagtttttcaccactgagtatgttagctgtggacttgtgatcgctggccttctttgtgtttagggcatgttcttcaatcctggtttgttaattttttttgtttcttttcttttcttttggtggggggaccagtctcgcttttgccgcccaggctggagtgcagtagagacagggtttcaccatgttggccaggctggtctcgaactcctgacgtcaggtgacctgcccacctcagcctcccaaagtgctgggattacaggtgtgagccactgcaaccgaccagttgaattttttttttttaatcataaaagtgtgttgaattttgtcaaatgcttttcctgcatgagatgagagggtcatgtggtttccttcctccactctgctaatattgattgattttcatatattgaactatccttgcattccaggaatgaatcctgcttggttagggtgtagagtcctttaactatactgctaaattcgttttgctggcattttgttgaggactttcccagtgaggctcatcagggatattggcctgccatttctcttgtggtgtgtttgtctggctttaatatgagggtaatgctggcttcctaggatgagtgaggaaatgttcttcaatttgtccaagagtttgaggagtggtactgattcttcttaatgttttgtgaattcacatgtgaagaaatcaggtccaggtcttctctttgaccttttatagcttgaagatcttaggttcccagaaaaattgcaagggtagcacagagagctcccgggcccggggccttcccacatggtgaacatcatgtgtcactgttggacccacccgcgaccaggttttgccccagaatcccacccaggaggccacgtgacatttagctgtcacttctggtgggctcctgccaggtcccgtgcttcctggaggggtggccctgtgagcatctgcgtagcccctctcctctgctgggccctgggtgacgtgcagccactcgggtggaccctgagggtccctgcacctgtttgccctctcttgggtgggctcaagaccaaaaatgatgttgagcagtcctgggcccctgagccacagtggcggtgcggctccggtcagtgtctcctgcgctcccgggcccccgacccacagtggcggtccggctctggtcagtgtctcctgcgctcccgggcccccgacccacagtggcggtccggctccggtcggtgtctccccacacagtggctcttggcgaggggtgggcgctggcagaggggacgggcaccacgtggtcatccccatgacaggttctgtcatggtgacagtgttgtgggaggatggtgtgctgctgcccctgcaccccgtgagatgaatcctgcctctgggaggtacagctgggacggggcgagggacccactcagctgtccaggaagggtcccctgccctgtgcttcctccaggtgtcctggtgcactcctgagcacggcacctagtgggggtccccacaccctcaccctgacccatgggtgcctccccttggggactccacgcccttcgctggcactgagatggagagcgacctgtccgtggcagaagggctgctgcacctgaggtgcctaaggcgacaccaagggccacagccccagtagctccagcctccgtgtgctcaatgccaagccctgtgcccaggaggacagggaaatggaggcagaggtggccttgatgtcccaaggtgggcagtggctgcctctgccctggaggcctgtgagggtcagggtctgagggtctgaggtgcactatgacccgggggcactgcctggccacggctgagactcgcagagggtctgcagttcccacctgcctctcggaagctgccctgggtcagccgtcagtggtgctccgccttgggttttctattatcagaaagtcattgagcaacagcagtgctgaggacgcaggcagggctgtgggcactgcagggccgctgccagtgtccacatgcgtgctggctctgccaaggtgtgggaagcctgtgtttcaccctgaggttgtcctggtgcccctggtttggcccctccccacctcggggccctggcgtgcattaagggtggcgggttcccatagcggcctccctcagctccctctctcttcactaggccacggcatatgcctccaaggacggggtcctcactgaggccatgatggacgcctgtgtgcaagatgctgtccagcagtaccgacagaagatgcgctggctgaaggcggaggggcctgggcgcggggtcgagcaccccctatccggagtccaaggcgagaccctcacctcatggagcctggccacggacccctcctacccctgccttgccggcccctgcacatttaggatatgctcctggatggggactgggctgtgcagggacctctgtcccccaggatgtcttgtggtggcggtcggccgttctgccccccagggcaccccctgttgtaggcactggctagggaggggcaggcctccttcctgcccctcgagacactcttgggagatgcattttccgtctggctcacagggggagggtgaggctttgtaccccagcccctgcccaggccactgtgagggtgggtgctggctgagcccctgggcgagaaggagtggggcaggcggggtctttgttctcggctcccacagcagagccaggtgagggggggcctgccaggactagacagaagtggggcggcctgaaccctgcttccagccatggccaggggccacggaacccggcaggggtgtctgaggccgccctgtcagctggccggtccaagcctgtggctggagctggtgtgtgtttatctaataaagtcccacaggtgcctcacc

SEQ ID NO: 376 - DNA, 490 bp, Homo sapiens
atgtcaactactgactagaactggtggaaaaggttgtttactgaaactgcgaggaaggtagactttaaaatgcaggacaaagactgaacatactgatatactgattctttgaagggaagtttagaactcattgtatctaacattattcaggcttaaaacagtttccaatccagtgggaaaagtcactccatatattccgtgaagtcaaccagttccatcaaggagaaagtcagggccgctgggagcgcgtggaccgtgggctccggggcggcgcctgcccgggcaccccggccccgtccacgccccgcaagaggagctcgctggccccgccacgcgggaaggggtcgccccggggtcttgggcgggagggccgtgcgggctgcggagacaccgaggaggggaggcgcctctcctgagctcttggcgcagcgaccccagggcgccgactcatcgcggaagggctcggcttgcccgggcgccggtgccgcct

SEQ ID NO: 377 - DNA, 318 bp, Homo sapiens
aactggtggaaaaagttgtttattgcaactgcgaggaagttagactttaaaatgcagaacaaagactgaacatactgacataccggttctttgaagggaaatttagaattcattgtatataacattattcaggcttaaaatagtttccaatccagtgggacgagtcactccatataattctgtgaagtcaaccattcctatcaaggagagagtcggggccgccgcgagcgcgtgaaccgtgggctccggggtggtgccgacgcggctgcgggccgggactgacgttgcgccgggttcgagtactcccctccggagttt

SEQ ID NO: 378 - DNA, 517 bp, Homo sapiens
atttgaagagggcttgccttccaacctataggcactatatatgcttttggaaaaagtaattaggttaagatgcagttgttttgttttgctttgtttttcccttagctgggttggggtttctagcagcaatgatgtacaggtggatcttttttcacattaacactaccagctgctccatggctatagtgcttaggaatatctcagaatttcaacagatctatcagctgcaatatctaggagtcttgccaacacagagacacattcacatgctgaaaagagcatgagttgaaggcacagctggggacttttgatgcaggtccagaactggatggttgtgaagccattagagatatttaaattgtccagaatttcaggctctgctttaaaaactaggctacaaaccctcattcagaaagaggtcagtaatatgcctgtgagttagaaagatactggaaacatttcaatgccaaaagtaacatttttttccagaatgctatgactaaattttttaaaaaaa

SEQ ID NO: 379 - DNA, 18501 bp, Homo sapiens
  misc_feature (9479)..(9480): n equals a,t,g, or c
cccctgccttttttttttttttttttgagacggagtcttgctccgtcgcccaggttggaatgcagtggcgcgatctcggctcactgcaagctcgactcccgggttcaccccattctcctgcctcagcatcctgagtagctggagctacaggtgcccgcaaccacgcccggctaatttttttgtatttttagtagagacagggtttcaccgtgttagccaggatggtctcgatttcctgacctcgtgatccgcccacatcggcctcccaaagtgctgggattacaggcgtgagccaccgcgccctgccagcccctgctcttttcaaagcctgcttctgcagctgcttcatcaatgctatttactcccaattatctttccaatcaattcccttttgctcaaattggagtcagtttctgttgctttcaacccaaagaacagttaactgatccagctttcatcatctggcccatttccagtcttagttccctccagcatatgccataaccatagctcagtggttctcaaacctgagagtgcaaaacaatcacctagaggtcctgttaaaacaaatttctgggctccattagcagcagttcagttcccaagtgatgctacctctctggtctaggaaccactgctctagagttctctttacatctccccagcgtatacccctatttgggtagggtattcaactgtcccattttgcccaggacttaaaggtttccagggaagtaggactttcagtgctgaaaccaagccagtctagggcaaactggactgtaggaattgtagctgcaaagagccattctcttcaccacccacaggaaatagaaatgaaatgtaaacactttcattccactctcctttgtccccattaaggaaggacttggtaggcacactcagcagatgaaacattaaaaggctgcctctccttggcatagaaatcactttctgatacagagaatggacttaagcaggtatccacagagactactttatttatttacaatgccatagtttagaaaacaatcactcctgtacgtggttcttaccttaaggtcaccggaggagaacatgctgatgtaattgttgaccatcttaaacacataccctcggtccataaatgtaaagcagcgctaaaatagataaaattctaaatttaaacacttttacttgaagaatcattaaagattttagaaaatatgattaaatatattgaagtaaaataacactaaactaaatgtgttgtataattaggtatttaaaaaatcttctaaagatgtttaagcagtcatccacatatggcaactaaaataactacaatttatattaaaaatgaaaatgaaacagggcaatatactaacagagaataggtacatttaaaaattcagaagaaaacaagaaaaattgaaaggaaaaacagaatgaaagcataaatgaataaaacaaaaatatcaatcagaaagttataaatctatattgattttataaaatgtcactggagctttgcaatgaaatattatagccccttcttttttatacagaaagctttagctttcggttgtctacttttttaaccacttagttacattttattattttcttttaataattccatttcacacttatggggttgtaaatcttctcctgtacacactgggtcataatgaggagtggtagagacgagtcaggaaagccttttaaatctcactggccccttttgacagagtagctcctctccttatcagctgaggaagcttgcatttgaaggctgaaggaaggagatcgtaagatttctatcagcgagctgcttactacctttcttattctgtggtcaaattctctttactgtatcaaggagagtcttaaacagtaagtaggcttggaggagcacttgctctctctccaaaagacggatggtcatgtaaccagtaaccaagctaccacggccaaagactgcacaggcaaagtgtggagcaggaggaagggaccatagttcccaacgcaggatctggggaggcactagagcaggtgcctcccatagtggatctgcagctcattacttggtgtgtgagtctcattctattcacccacgtgggtgtgagtaaacatgctgcttgggaaaattccacagctggtgtggagtgcttctttcttgtcgaaagtgtccaggatgatccattaaaatggttttgcatttcttggagtctctcctcaattttactcacagacaggactacacataaaatcttgctatggagagtggaccaagagctctatggaaaacattcatttattccaaaagcacaagctatttaagccaagtagagtagatatgaagggttttcactttttagagacttgcttatccatccttatctgatatttagagagaaataccacagatgtttaaaccaagtctctctctaatattaggtgatttccaaatggttttcaacagctcattgaaacaaagcagtggttagtcaggcgaatgggctaaaagatacggctatccaatcagcaaaataaaaatcagaatgaatcagcctttgctaccatcttggtattgtgcttcataaaaagagtgtctaaataggtatgttcagataagtagagctgtgacccaggtgggtggcaaaaagaaaaatgacaaaagctgcaatcatttgaatcctatttacttcactgagagaatagttgagaaatgtacaagctttttggcataattgctgaaaaaatattactttcccataatgtggggtaagggaggctaccttttaatgtagaacatttttatatgcccacacactggttcccagaggttcttcttgattcttggagaccaattttgagcaacccatggagttacaataatattttaattgttaaattccaatgttgactaattcacagtatttgctaatgtagacttcaataacaaaaagaggtagcagtcatttgaagccccaattgagcaaataactattgtttgctggaaatataagagatttatgacatcagcactaggagtgggctgtgttgagcatctgaaaactcaaatttattggaattgcaccaaatgactacgttcagttttacattttcaaaaatcactttcttttcctttcttttttttctctcctagctcaaatgattcatctaataagtgttccaattttttttaatattatgtgtcaaataaatgccattaaaacttcaaattagtaataaggagggtaactatgaggtcttttcccttttttagagacttgcttattcgtcattttttgcagtttagggaagaatatttcagatgtttctttcaatatattttatttgcaaactgaactatacataattctttctaagtttcctagtaaactattagcatagcaataaactttattcccataggtcttaaaatgtggtagaaaactacagtaacttttcccccctttaaacttttcccctttaacacttatcattcttgtctctttctggaagcaagaaaaaagtaaaaatcagagacaaaaccttgaagaaaaaaataaattcaggataagaacacatacagtgtataatttgaaatagtttttaacacattaaaaaaaagaaattaggctggattaaagctcaccagtgacaagttgggcccattttccacttctataggcttttaactgtatattattagcatttatttatacattctcacactcacccatatgttctggtgactaccattaagaaacaagtcaaatgacttcataaaggttatagtagtcaagagttagactaaagaaggaggcacagaaaactattatctttctaattgcttgcattatctgttaaatggtatactgtaattatgtatcttagttttttcttcgactttgcatttctttcctctcagctcaatataaatggttgtaacccaatgaaatataactaatttccatacatatccagtttagtaagtagctactcaatactttacttgataatttttctttcatgggatcagtgtgatctttccataatgtaaaaaacagcgtgggtcaaccttggtggctcacacctgtcatcccagcacttagggaggccaatctcttgagctcaggagtttgaaaccagcctgggctacgtggcaaaaccccgtctctacaaaaaatacaaaaattagccaggtttgtgtctgtgtcctactcaggaggctgaggtgggaggatcgcctgagcccagggaggttgaggctacagtgagttgtgatcatgccagtgtgctccagcttgggttgacagagtgagatcctgtctcaaaaagaaataaagaaaaaaaagagcctggagataataaacaaaaatgctaaattcctgaagcgtttcccaaagtggctatttggtatcactgtcagagctaaagccattataacatcactttcaaaggcagaaatgtccaagagaataatattactgtagtgcagcttcctttttaaaaatttcattttttctcttaaaatatatttagaaatactatgatttgactgcactcaaatggatacttttctctaaccttagttttttttttctttcttcctgtcttttttttttttgagacagtctctctctgtcaccaggctagagtgcagtggtgtgatctcggctcactgcaacctccgcctcccaggttcaagtgattctcctgcctcagcctcccaaatagctaggactacaggcacgcaccaccacgcccagctaatttttgtatttttagtagacacggggtttcaccatgttggccaggatggtctctatctcttgacctcatgatctgcccgccttggcctcccaaagtgctgggattacaagcataagccatcgcgcccggccttctaaccttagtctttattcaataagacttcaaattgaaaaaaaaaattaaaaagtatttcaagcaataaagatgtataaatgaaagttttcatctgacagtgctagttttgatttttcatcatacatgaagatgtgaactgatgaaagtttagactatcttgcatccaccaacatggggccttgaatagaactgcgatctcatataactgtaccttgagaaatctggcaacgctgtggtttgcccttcttgtttcttcaagtgcatccttgtatttccaaatcacatggtcggataggaccatgacaagattgtccaattcattttggtaagattcaggaaatctctgaggccggggaagctaaggaaagaacggattatatctttctaatgtggcatgtgaaatattaagccgaggaagtatcaactgaaatatttactttattttataggtcattaaagaaaaagaatccttttgaaaacttgaaagcagtaataaaatagaagccttttactttcaaggtcatgatttccatcattaatatttagtgtttccttcaattttggtcaataaaattttcactttataataaaagtcaatcataacaaatattaattgcaaactattgaaacaatgtagcaatgtacaaagtaaaatgtgaaccttctctgtggcctctcatatcttactttccctccttccctctcagggaatagctactattaatggttaatgaacattattctagatattttggacatgtagttctctatttcatttaaaaataaattattttgatttttttacaactaggaatgcccccaataaactagtctaagaaattaataaatgaataactgaatgaatacagatattggtttgaaatgtcctctgacatttggtgagtcccagctagttttaactccctggtcccagtatatgccacagttaagagacaccagtgggacctcacaagtcaagataaagaagggcttggctgtgagatgacattacatccactgaataaagctctatggatctcaaaagaccatttcaggtccagatatccatccctcctgtttggactcctgcatatgaggggaacatttgaggcagccgagttcttccatctcagactctgcttttttttttttttttttttttttggagacagggtctttctgtgtcacccagattggagtgcaatggtgtgatctcagctcactgcaacctctacctcctcagtttaagtaattgtcccacctcagcctcccaagtggctaggactacaggcgccctcctgtagtccatacccagctaatttttagtagtgacagggtttcgtcatgttggccaggttggtcttgaactcctgacctcaagtgatctgcttgccttggcctcccaaactgctaggattacaagtgtgagcccccgtgcccagccttacttctgataagattcattcatctttaccagctggctttaaaaattagacccagacacattttcactatagatagaatcatggaatttagagttacactgaactgtgtatttctaaattgtgagcacccagacttccatgctgcaaggataaaaatcatgaaggctgaagttacaggagttgtatgaaacagatatttaatggaatttaacgggatgttggagctggtttaggctggcttctatttttttttttttttttttgagatggagtttcgctctgttgtccaggctggagtgcagtggtacgatctcagatcactgcaacctccgcctcctgggttcaagcaattctctgcttcagcctcctgagtagctgggattacaggcacctgccaccacacctggctaatttttgtattttttagtagagatggggtttcaccatcttggccaggctggtcttaaactcctgacctcatgatccaccagcctcagcttcccaaagtgctgggattacaggcttgagccaccccgcctggccagactggcttctatttttaagccactttaccaggacatcactgcatggatatttttgaaaatttcatggttactctctatatatttaaaatttattgttgaaatcaaataaattaacaactaatgaacttaactgatttgatcacacacagcatttttaaattctcttccataaaacttgggtaataaaggtaaacaattcacctacaaaaagcaacagtcaccttttaaagaatcaaagcacacttttaattttcaattttcgttttgttagtcctctaaaattccttaagcatatcatacgtacattttccccacatgcatatgcatgaatgccttgggctttaatattccatttgttccttcctctttacaccttcctctcaaagtctcctgtggcctactctcactctgaacccaaagatgtctgcctaataaatatatgagtacttttaaaactgttttcccgaagtatatcctaaagactcgaggtggaagaattcctgcactggagattgtgaattttttgtctcaggagatgaagggagtgagatggtggcacacttcccaagctgcagagctggaccatgatgaatctgagctacagcatggcgaggtcaaggggaacaggcctgggatgcatgggcagaactgtaggcttttgggagttttgttagaaacaaggaggatgatgggaaacaaaaggtttagctggttcaatgatccttttgctactagagaataatgttgagaaaacattcagtggttcccaggaaattgttttagtttgtttgtgttttgttttgtttgagacagagtctctgtggcccaggctggagtgcagtggtgcaatctcagctcactgcaaactccacctcccgggtttaagcaattctcgtgcctcagcctcctgagtagctgggattacaggtgtgtgccaccacatccagctaacttttgtatttttaatagagatggggttttgccattttggccaggctagtcttgaactcctgacctcaggtgatctgcccacctcagcctcccaaagtgctgggattacaggcatgagcaactacacccagccattcccaggaaactggaactcacgctggccaagtgcccaacaacattgcaccttttagaggactaaaccagatatctcccctgacttcctcagatcttccacacttactccttggatgatggaaattcctttaatagtggagaaaaccattcacttcacaatttaaaaagaaaaaaaaaagaaaatacaaatagcttgggaaaagtttactgtgaatgctttggtgtcaaatgataatatcagggctgggtacaatggctcacgcctgtaatcccagtactttgggaggctgagatgggcagatcacttgagcccaagagttcgagaccagcctgggcaacatgacgaaaccccatctttactaaatatatataattatctatctatctatctatctatctatctatctatctatctatctatctatcatctatcaatcatctatatgaaattagctgggcttggtggccatgcctgtagtcccagctactagggatgctgaggtgagagaatcacctaagttggggaagttgaggctgcagtgagctatgattgtgccactgcactccagcctgggcaacaggagtgagaccgtgtatcaaggggaaaaaaaaatgggccatgcgtggtggctcatgcctgtaattccagcactttgggaggctgaggtgggtggatcacctaaggtcaggagttggagaccagtctggccaacatggtgaaaccccgtctctactaaaaatgcaaaaattagctgggtgtggtggcatgcacctgtaatccaagctgcttgggaggctgaggcaggagaaccacttcaacccaggaggtggagcttgcagtgagccgagatcgtgccactgcactccagtgtgggcgacagagcgaaactccgtctcaaaaaaaaaaaaaaaaagtaaagaaaaaagatgatatcaggtcttttcccactgtgatgattagagatggttagagtggaaggtgcagggctcctgaaagaaaactagggtgtgagggttaccactgaaaggggtcacggaaagcaaacctcaatcggagaagataaactgctggacacaatcatgctggctattatcagttcatttattcttaggctgctcacaggtgtgttttgtgacctgtctatacaagcagatgcatactggtaggaactagaagagaattttagtccaatccactcttcttacagatgagaaaacaggcactgagatgttaagcgtcgttttcgtcagctaacaagttagtgacagagcaggaattgcaacagtgaggtttcctgaccccagtagagcttaacaacagagagatacgaaccatttttacctttgtgttagattttctctccctcccaggtaggaggctctcatctccagaagtggagagcagaaatagcagaaaagcaaaaataggatttgcgagttaagagttatggaactccacagatgattaaaggtccagcaagccatttctgtcatactagatcanngccatggttacatagacctggggcctagaagcatggatgaggacctctggatggatgactctgaggaagtggctctgcacacttccctgaagccttagtgctagcagaagtttaattcctccctattaagtgtcagcactcctcccatgcaagatgatattgcaaaggcctctccctgctagaaatcaggcaaacccttgaggagttgtcccgcctctccttctggtgatcagggcaatacctggaggttaaatcctagcttaacccagctgggggcttgctgggcctaataaagcaggaaagagaatatacccaaagaggctataaaaattagctatcatgtaccaccaggaggtagggcagaacctctgcaattgtacattgaggatgtgggccagaaagtaagggcaggtaacttagaatgcattgacatgggtgtgctttttcagaacatgggattaaataaggactcacgggatgagcaactcactgctagggttgctctgagaatctagagatggcctactttaagcaaagtcgaaatgtctggttgtcctggcagaggatagaggaaaaaataaagaggtggagggaggtggatatacaggaatggacattaattgagactggaagatccaccagtgtatcaagttccccaggcaggcccagaagacagcatgcaccatggccactaagaaggtgctggggaccaatatcattaagaaggtcaggggtgtttcccatctgttggcaggaggagcagtcacagtcttggctcatgagcagccatggggatcagggatcaccaaaacaacagaggccatgtgctgtgcttaatctccaggagccagggggctgtgagtatcatgacaaatgacaagactggtggggaagccaagagggaccgactctcagggagttgtagagctggttaatgatgactggaactcctagggacaaaacagagagcaaccaacaatggtggtacatcatattaacaaagaaggcaagaatgggcaactggaagatggggatgttcattccaatgaatagtcatggttcctttgtctgttcctggacctgagtcacaattcagatctggtacacattgactgaagaggtgatggggtccctaaaggaaagcccccactgcaacaatgcagtagatacatactgtaatgagtctatcaattcttctccaaagggccctatagccatttactcaggctactgtacactgagaagaagggcatatagttcaaggactgttgcacacagaatctgagttgacattgatatccagaaatgaaaagcatcaccatgtctgccctgatagagtggggacttacagggattaaaggtggagtcctgactaaagttctgttaacagtagatccactgggttcaaagatccccccaatagtcatgtaactggtcccaaatgtataatttgtattaataaaactggcatttggagtaagcttgcacgggtgcttggtctgtggaggtatcctagtgggggaggccaggtgggagcttctgacactgcttcttccccaccaaaagagtaaatcaaaataatataactgtacaccaccaaccccacctcatgcagcattgttatgatttaccctccacgtggggcaggggcaatgccagaggtcttcccttggccttacccacaatgggggctcagagaaatgtgtgtggaactcaggtgatctacctggctgcttcttggtcttcctcactccattgtaactgtgaatggccataggtaccaactctggtgtgagtagagtatgatgaccagaggctgagaccactctagaatgagggtttgggtcatatcaccaggtgagtcaccaagaccttcggagctgctagttagagtgagagggatctagaatggagagttgggatgggagatgatgagtaatacataggctcctgaaaagccatggaaggggctgtaattaattccatcagggtccctcttctaagcttcctttcaggaggggaggcccatgggaactgcagggaagcagattcatgaacttgtacaatatgtcatgcaaacttggactgtggcagccaggaatgcacatcgctcaaatgttccttcaagacagaatctagtgggaagaatataaagagttgctgtatcttgcaatatgctccagcattcatgccaaggctaccctccccccaggctgctcccagtcaacgacttagcttgcaaaggtcctggaggccgatggccttcccagtgcagggttcctctaatgacaactctttgctctcagacttcccatcagcccagctaaaaccttgtcactgtgagactcttcctagccaatcctccttccttcccccttttcatttacaggtatcagactttcccatttctttttcctgttccttttatcctttatagttatttccctccaatacatcttttgcacttccaatattgtcttggcatctgcttctgaagggcctgtgccggttggtgtacacaatcatttcttctacttataaagtaattattgtaaactgctaaggtttataaagcaaataaaaatggaactcatgacagcataatcattagtgtaattgttggataatattgtaaaaatattataatattatattacttatgttcttacctggattttatttgtgtcaatcaagtgctgtgccatcgattttaggataattgcaaagaagaaccaggaatgctgttgggaaaaaaaaggcaacgagacatttattatcctatggcaaaataatgataattttttctttgcaatatgtaatactataacattgttatgttaaaatgtattctttgaaactaaatgaattagagcagtaaaatattctctattatagtgggatgatttttatctcaatcctctcaaaaaatgtttaaactaaaacaagttacaagtttatttggcatgactgactaagcagttgttttacaaaatatttattcaagggatgttctagttgtttcacctagttaaacaaaactaaacaaacttttatttatttatttatttatttatttattttttgagacagtctcactctgttgccaggctggagtgcagtggtgcaatcacagctcactgcagtcttgaactctccggctcaggtgattctcccacctcagtctcccggacagctgcgactacagatgtggtcaccatgcccagctaactttttgtgttttttcgtagagacagggttttaccatggtgcccaggctggtcttgaactcctgggcttaggtgatcctcccgcctcagcctcccaaagtcctgggattacagttgagagccaccaagcctgacctaaacaaactttttattgtaccaagctcacccctcaaatttcaaaggttagaggtaagggtgaaaatggaaggtcatatgtctagatatctagaagttggaagtcaagctgaaaatgtgttaaataaaatatgtttgatcctcctacctcgagaaacaaaacttcataacaccttggaatgctgccccagggtgtgaggtcctggggggcacagggcctggcctgccccttttcttctcgcccaaggctccgtcctgccccttgaggggcctggtgcgcatgtgttaaatactttaaaaaacaaagcttcaaaacttatgtcacctaaataactcaatctcaaaattatctgctcatgccagattttgtcatgaaataaatgcaggcccaatgataagagcagtacacacctgttcctacttagggctttgcagaggtagggccttgtacgcctgagctcttttggaaactgtccagcctgcacatctgagtgctgtccacaacctggccctcctccctgccgcaaatagctccttaatggggtctagggttgcactcaggcatcaagacctgtcctctggaggtcctggagggcttgggacagagattgaagcaggcctggaaatccacctataggaccttgagcaagagggtcttggggttccttacaggtctagaaggggaggtaggggctcctggtgggcttgttctcttagctcctcttaaaccttggcctgtgaggacaggtgcagtatgagaagaacaaagctcatcccaggatgggcacccttctttcttgggcctaagggtgacacttatctcagctacaaaaagtcatattgtatatgtatagtttcaagaacgcaccccttgcatcctctctgcttcctactccttccaccacagataacagttttaaattttgtgctaatcattcctttgctttacttcacaattttgctacgaatacttatacaatgaagggatatttagttcatctggccactgaacttcataagaatggaactatcctctatgtattcttctgagattgcctttttcattcaacaaattctgttctgtggttcgtttatgttgaagcacgtagctggggggatcacatatggtcaccacatgacatatataatcaccatgtacttatctgctctactgtcaatgggcatttggattatatcctgttttaagtcatacaaacaatgctgcgataaacttttgacaagacagtcctaattccagaagactgactcagataaaaaagagaagggattgatattctacaaaggcagctatggcttaatgaagtggtcacttcttagtaagaagaaatggaaatggctaccaatactattctagcactccaatagcattctaatggctattagaagtgaaacatgttgttaggaatatgaatgaatcccaggcacactgctgcaatcctctttccctaatcttgtccaaaatattttgagccatcgtgtcaagtgttccaacatttgtctcttaattcaacagactcctacccctctccatcccttagcactctggcctgcctccactattttccttgaaaccaccagcactaatgaaattgagcttttgcctgttcacgtctgatgacagatgaagcctcaactcctctactgccctctccacatattcccttatatatctgcacattccactgcttccaatctcctgaaacccacccaccccaccttccagagcacatggtccatcgttagcacaatctcttgaagatgcaattcttctccgagcattcccttcactccatattttaactgagcagtgactctccccagaggatcctgcttctctgatagcccctcaagtggttgtggtctccatttttatcccactgtagtcgattctcaacacagcaatcagagggatccttttaaaccaaggtcagcttggtttaaaacattactcctctgtgcaaaaccctccaacgacacaactcccagttctgctctgagtgggaacgcctggcctatgctaactcccaagcctccagtggcttccatgacttcatcgtccatcttttttttttctttctgctcacttggctccagccacagtgtcctccctgtctcctgccacagtgtcctccctgtctcctgcagacacaccagccatgctgctgcctgatgacttcacacaggtctttccctctgagcatccccatggccagcaccctcttcgccttcaaattttttttttttttgctcaagaattacctcctccatcagatatcctgaccattctatttaaaacttcaaatctcccctgcaccttcagcactcacaatgcccaattcttacctgttctacaatttttctaatgcatcttcttttctaacatacaatatctatctatgtatctctctctctctctctctctggtcttgttgcccaggctggagtgcaatggcatgatctcggctcactgcaacctctgcctcccgggttcaagcgattcccctgcctctgcctcctgagtagctgggattacaggcatctgtcaccactcctggctaattttgtttttgtatttttagtagagatggggtttcaccatgttggccaggctggtcttgaactcctgacttcaggtgatctgcccatctcagcctcctaaaatgctgggattacagaggtgagccactgcacctggcccactctacttttttctatgttgtctcgatatagatctcttttgcttagtatctttatatgctaagtttcaatatgaaccttatgctggaaactgcaagagaaaaagtctatgaaaatccatgactcctatcattttccaggagtaagcgtgacccatgcctagtactcacagttaaaggaccatctttaaattcttacctttaggacatgctttactgttgttgagtcatttgatttcaaaagaccagtcacatttttagccagttcctcatgtacagtcctctccttgcatgccctggtcttgaacacgaactgaagaaaatccaaaaagtgaataaagttaaatactttgaaaaatgaagcttcaaaaactatgtcatgtgaataacttatgtctctaaattatctgctcatgccagattttgccatgagataaatgcaggcccaatgataagagcagtacacacctgttcctatttagggctttgcagaagtagggccttgctcacctaagctctccttgaaactctttgtagaaatcaagagaaagagccagagagccatttagcacgttcaaggaaacatggagggctttgacccacctacttaggacacattccccttctccttcctccactggtaacaggtggcatggtagcaattcttcatcctgaaagggtagagcacccactcaaatagccaagtggggaagccagtgccttccagatgccagtacgtgagctccccacaagcccagggtctatgatcccatgcttagacacactatcaaggcgttcatgaacattggccatcagtaagataacaaatgctgcatacttattttttttcctcaaaaaattggttttggcatgcaccactgagggcacataatggctagttttcagtatttcttcatctcttaagaatatcagtatcaatttatgcacatacataaagttcaaatataaaatgcttattactgaattataatatttcacttatgaattgggtttgcctcgtggaaggacatttcttcataattttcacaattcggatttcaccgtaattgagagtgaaggcaggaaagagaaggaatggcttaatgtagaggcacattagcttttggatctgtaactgtttctttaaactttgtagcacattggcacctaacttgtcatggtgggatttgacttctccaagctcatctcaaaggagaaagatgaagttaatggatgcatgaaactagataaaatcaagagtaatacaatttttccctctcatgggttatacctcagatgtgagtaacgtcatcatcaatgagctcatgccatgcacagttatttagcctgaagggcatttaaactggcactgaaatattcttattttaaaattttgactgtaacccatcagtgctacaaatcactgttaaccatggcatttaattagactggctttagacacgcatctttgaaaaagacacggtgtatgtgtgcattttgcatattgtagacgaagtgagttagcagcatttagcaccactgaacttgaaatggtgtttagataacttctaaataaatacaaattgtattgaatatcacatctttggaggacattcaagcacgcactgtaacaagagtccaatcacaggatgatagaactgaatgttcctttggtcatttcatctcatgtcacaggagaaaactgaggttcagagaggctgactgcttaagtctagaattgactagaatctagtctcttacttgccagcttagtgttctttcccgagtaaaatgcgagttgattacatttattaggaggtatttgttttagatatgttaaaatttattataaaattgttatcagcctaaaattccacataggtgtatttttggatttgaatcacttaaagcaagctaagtagataatctcctgtattataaagtgagatggtcttgttgggtatttcagataccctggttaaaaataaaggtcacgccaggatgcatttctaatgcatctctccaggagcgtcaccggtagaaagtctgagatttgaggtattcacaaagagctagccttggtaatcacaaaaatagtcacaacaccggaggggtcttaatgtaattttcaatgatcccactgacatgaggaaaataatatgtgttgaaatggagatgcctgtgtgtaagatggatcagtaactttttttctctttctcagtccctttaaggattgaaatgaaacattcgggtaatgaagcattgagagggtgaaagttctccaggtgattctgttgaatggtaaattcatcgatactctataaaactaagctatgaccctatcttagggagcaaactaaaaaggcttgtgtaggtggaactggctttttgcagttgagatgtggatcttattgggtaaaattatacaatagagaaattattgtgaaataactatttttggcatatagcctatgtttaaaaagggcacatactcatgctttggcatttgggaagacaactaacatttctggcagatagaaaacatatggatataaaaactgtaatgaaaaaaatttccttacagatggtatctcagaggggttcactccagaatgcaatttctggttacttccttttatgggagtgtggaattttttttttttttttgagatggagtcttgctctgttgcccaggctggagtgcagtggcacaatcttggctcactgcaagctctgcctcccgggttcacgccattctgcagcctcagcctcccaagtagctgggactacaggcgcccaccaccacgcctggctaattttttgtatttttagtagagacagggtttcactgtgttagccaggatggtctcaatctcctgacctcgtgatccgcccgcctcggcctcccaaagtgcttggattacaggcgtgagccaccacgc

SEQ ID NO: 380 - DNA, 202 bp, Homo sapiens
ttctttttttttgagacggagtcttgctctttcacccaggctggagtgcagtggtgcaatctcagctcactgcaagctccgcctcctgggttcatgccattctcctgcctcagcctcccgagtagctgggactacaggcacccaccaccacgcccggctaattttttgtaatttttttttttttttttttagtagagttggg

SEQ ID NO: 381 - DNA, 17646 bp, Homo sapiens
gtttgtaaatattatctctgtggtttttgtcctgcggaattgttcacaaatacacgttctgatcttggtaagtgaattttctgtgtaacttttatcaaatttatgatatttaaaatgttgaataggagtggtgaaaggaaaaaaactgattataattctgtgaagttttttcttaaagatttgctaataagtaatttcttacttggtttagatatttgaatgtattaataaatgtcagtctgattaaacatggtggcttaattaaacatacatgtctatttccactccctcccaaaactccacttaaatgaaaaaaattttaaaaagatgtatttggaagaggagataacattagagatgtcagcaaatttttggaagatgacaagtggatggaggagtagcagcaaacgcaacagagcagagcaacctgtaccctaaaagcctgcagaaggggatactaaacagaagcgagtgtttgatcagcagaaccctggacaggctcaggatttggaggcaccaggtaccacagaaggcagggttgagtcatggggctgaaaatgagagagattagtctgtagtctagttcagggtttctcaaccttgacattgttgacattttgagccagttttggagggggcttttcatgcattgtgggatgtttagcaacatctctggcctttacccactagataaccagtagcaccccctgttgtgacaccccaaaatgtcttcagacattgccagatgtcccccaggatgcaaaattgccactagtgtaggtggtcctgtgcatctgttgatcttactctcctccccatagaccccaggagaagagagggttattttctggagaaattggactagagagactagtttatctgaaccacaaaatagaaaaaaataattgactatttcctcaattctctcaaggatggtacataaccaggatcattctggatacataaaagaagtcaattcattatgtacaatctttgccttagagcattaggagcatattaaggcaggaccagtctagatcttgagatttcagacacagcaggggcagtagtaagttaaaaaaagaatgtaaaacagagtaaatgaatctatatttttattggtggggctctcctctgccctgttcctagaaggatacagccagatgtttttccccaggcagaagaaaagaggattcttctctagagaaagtgaacagttcctgagaagtgatctctgcaggtactgacccttggggaatctcttaaaagaaagtcttactgcctgattttcctatgataaagcccattcatgagctgacaaaccctgcctaatccctactaacttccagtcagattttggaagtgtctttttaaaaaattagttgcttgccaaggaccaccagccagacgttcgaagaaagccttcaacacaagagattaacaaaaccaacagagaaagaagaatttagtggaattggagataatggggaaagcagaagagagattcttcaaaatcttaagaaatttagtatcttcagagacatatgagaagacactatattcttcagcaataatacgatgccataaagagggaacttgtggaaaaagtgaaaaacattttctgaaaaacagctcttagaaattaaaactgaagaaatagaactaaaatcaccagaaagatttgaaaataaaattaaggaaatttactggaatattgggcagtacgacagaaggatttttaaaaaacttagtccaggaactgtactaccagcttaatagttgtggacagaataaaagcagagggaattgcttaagaaaaaaaatttgcagtactaaaggacattcatctttaggttgagcaggtcctacaagtgatcaggacagtgaatgaaaaagatccatacctaggcatacccctgtgaaattttagaacacgggggtggtgggggtgggtgtaggtcacagaattatgaatcagaatggcctaagactggtcagtaacaacgggggaagttgaagacattggagaaacatcctcagggtgctgagtgaaaatgtgtctgccggagggggaaaaagacattttcagatatacagggtctcaactgatttatctcccacgggccttttctcaggaaactccaccaaaacatgtccataaaccgagaaagaggaaagaaaaaacaagagatccagtaattctcatctactacagagcagaaaaggaattcatcaggacaataattctatagtgagcttagaaaataagtatcccagattgaagtaaggcagaaggcccatggaagaaaatgaaactgatgatgtgatatattttgagtcatatgtgaaattagtattgagatagtttctatagctgagtttgaagtgtttgagaagaatttgaaaatatagagaaaaaactaggctcacacctgtaatcccagcacttttggaggcaaaggagggcagatcactcgaggtgaggagttcaagaacagcttgcccaacagggtgaaatcctgtctctactaaaaatacaaaaaaattacgcaggcatggtggtgggtgcctgtaatcctagctccttggaaggttgaggcaggagaatcccttgaacctggtgggcagaagttgcggtgagccaaaattgcgccgctgcactccggcctgggcgacagagcaagactctatctcaaaaaaaacaaaacaacaacaacaacaacagaaaacatcagaagtgtctcataatgagcctttgtttggcctgacagtgaatagtacttgcataatataagcaccaagtgtttatttatccaaaaattttgatgtctaggattgataaatagcaaaataagcatagaattttaaaaggtggaggtaaattcgggaagaaatagagaagagttaagataattgctttttagaggtgggaagaagtaggggttaggtactagtctagtgctatttgactttatatacagatttgaaaataataaagtcggcaatggttcagttcagtggtctgtccccatcagttttctttagtggcaataaggaacagtttcctttcaccttccctccttttctccctccctcctttacttctcttttaaccatatatggttgctgtccattatattgactttgaagactgagcagatcaattttatatcctatttggttatgatgcttcatgatttagtaggatcagtttagatgtctacaaactactcagtgataaagtgaatcctttttctttttaaaaagaaaaataactctttttttttggcaagaaaaggttgctaataatcacagataatttatacaattatattttttcccccaggtccgtgtgaaaaaattcatgatgaaaatctacgaaaacagtaagttattttgcttgtcatttccacccccccagttattagttggtttaagtgggacaagggttgaggaataattgcaattaaatgtaaaatgagtgtctgagagaagtccagtcagtggctggggatagtaagaaagttctatagcttcagtaatgatactgatagctaccacatgagtgcaccctgtatgtcagactttttttttctgtagcccatttgctgttttttttaaatgagcctcactgtgtcgctcaggctggagtgcagtggcatgatctcagcttactgcaacctccgcctcccaggttcaagggattctcctgcctcaaactcccgagtagttgggattacaggtgcccaccaccatgcctgactaatattttgtatttttagtagagacagggtttcaccatgttggccaggctggtctcaaactgctgacctcaagtgatccacccacctcggcctcccaaagtgctgggattacaggcgtgagccaccatgcccagccccgattttatccatgagacttgtcctaggtccagggtcatagatccagtacagtggtaaagctagtggttaaacccctgtgtaaagctctatgatgaggggcaatcagaaagtcacttcaaatacacctggtttaccctgcagcctaaatggaatagtcgttgaggctagttaagatagaatatttgagttgtaatggctgaagatttggaaatgagtacttgtttattttcatgttaccaggtatgagaagagctctcgtttcatgaaagttggctatgagagagattttttgcgatacttacagagcttacttgcagaagtagaacgtaggatcagacgaggccatgctcgtttggcattatctcaaaaccagcagtcttctggggtaagtgaagtcaattcagtctttgtaaacggtccttgttttctggagattcagagacctccctaatatttttgaaacttgtcttctgttcattactttgttctttaaaatgatatgaaacttatagggcattcattttttttccagtctttattagcaaacataacactgattttgctaaccataagatttttctttgtttttatttttcttgaggccaagatttttcccttaaatagtagtaactgacaatatgtgattgaccaacagaagttgaagataattgaattactatcctttcaattaagcattttaattattaaatagaaatattatgtatggtatgtgcaagtttgcatgtttatctttgttttcaacttgttggtaatacgttttattgtcttcaataggccgctggcccaacaggcaaaaatgaagaaaaaattcaggttctaacagacaaaattgatgtacttctgcaacaggtgagaattgtgtgcattaatgtcaggaagtaatgtgaaacagacatgtaaccagcaaaaatacaaggatgggccaggcatggtaactcatgtgtataatcccagcactttgggaggccgaggcgggaggattgcttgagccggagaatttgagaccagtctgggcaacaaagtgagacccagtctttacaaaaattagccaggtgcaatggcgtgtacctgtggtcccagctacacacgaggctgagttaggagaattgcttaagcctacaagggcgaggctgtagttagacgtgtctgtgccactgcactccagcttgggcaacagagtgagacctcgtcttgtgtgtgtgtgtgtgtgtacatgtacatatatatgtatctgaaaggacagcaaatatgaaaagacgctcaacactattagtcgttagggaaatacagattaaaactgcaatcaaatacctatttgacacctatgagaatagctaaaattaaactgatcataccagctattggcaaggatgtgagccagctggaactggggtataatattgcacaaccactttggaaaaaatagtctcatttttttctttcatattcctgtagatgatattggagtctgttttgttgtcgttgttactgtttttttgacagtcttgctttgtcacccatgctggagtgcagtggtgcgatctcagctcactgcaacctctgcctcccaggttcaaatgattctcctgcctcagcctcccgagtagctgggattacaggtgtgcgccaccatccccggctgattgttgtatttttaatagagatggggtttcaccgtgctggccaagctggtctcaaattcctgacctcaagtaatccgcccaccttggcttcccaaagtgttgagattacaggtgtaagccactgtgcctggccctggagtctcttaaaaagttaaaaatgtaccatatgccattctactcccaaatatttatccaagagaaatgaaaacatatgtctacacaaagatttacactccagtgttcatgagtgctatattcataatggcacaaaaaaaataaaacccagactggaatcaattaaaatacccatcagcaggtgagtggataattaaatcatgatgtatctatatggtggaatgcctgtcagtaataaaagggaattagctacatgagacaatatgggtggatcttaaaataattaggctgagtgaaagaagccggacaaaaaaggaatatagactctatgactctatataaaattttagaaaatgcatattaacctacagtgacagaaagcagatctgtggttgcctggggattgtgtttaggattcaggctggaggaggtactgaaaagagtaggtggctcacacctgtaatcccagcactttgggaggattgcttgagcccagcagttcaaaaccagcctgggcaacatagtgagacgctgtctttccttttttttaaaaaaaaaaacagagtctcacgtcatcatccaggctggagtgcagtggcacgatcttggctcactgcagcctcctcctcctgggttcaagcaattcttctgcctcagtctccccagtagctgggattacaggtgcccaccaccatgcctggctaattttttttttttatatttttagtagagatggggtttcaccatgttggccaggctggtcttgaattcctgacctcaggtgatctgcccaccttggcctcccaaagtgcttggattacaggcatgagccatcgcgtctggccgaaagtgcatttttcttaacacatcagttatactttattgaagtataaaaaaaatccaggataaattaaacccaaagaggcttttgtaaatgaaaccaaacaaaaaagatggaaaacaaccactaatgaaccatggggaaaaaagacaatagttgggtttgaaagaaatcttaactgtttttttcccctactcttctaagattgaagaattagggtctgaaggaaaagtagaagaagcccaggggatgatgaaattagttgagcaattaaaagaagagagagaactgctaaggtccacaacgtcggtgagtaaaccttatttcacattatctcatctgtctgttaacagttagtaggaactcatttttatttgagaacctttgaaaactgatgttccaaacttagagtcagcacaatttgtagcccacaaggtctgtggcatctactaagctctgcctttgtgcagtatgcaagcaactttatatagtacaagaaacaaatgggtgtggttgtatcccaataaaatgttagcaaaaggcctctctggcttgccaatcactgccttaaaccataaattttcatatgagcctggttttattttcatttttgttgtaataaattactcagtacatacttacatctttgttaaaaattaatacacccttaaatatctaattcttttaattggagaatagaatatacttgtttcagatactattgattgcagaatgtaattggtcattggttcctccatattgaataggatatgttcagattatagtcaatgtgcttagttccttaattagttttgtatatggacattattccttgaacctaagcaaggaatgtattcatactaaaataggtggctttctgaaaggtgatttaaattttgtaaggtaatgtgggtgttgaacattgaacagtgggtctcaacatttcttctggatgattcagtaagttagttgctgttaccttaaacatccctctctaaaagttgaccacttgtagtccaatattactgatttggggaaatggaaaagagcaattcacacacattagaaatcttttctaaatgttgagtactttcctgggatttgtttctcttcctcagatgttcttaaaataactgatttatcattttagacaattgaaagctttgctgcacaagaaaaacaaatggaagtttgtgaagtatgtggagcctttttaatagtaggagatgcccagtcccgggtagatgaccatttgatgggaaaacaacacatgggctatgccaaaattaaagctactgtagaagaattaaaagtaagtttttttgtttgttttgaggcagattcttgctctgtcacctagagtgcagtgacgcgatctcagctcactgccacctccacctcccaggtttaagcaattctcatgcctcagcctcctgagtagctgggagtacaggcatgtgccaccaggcctggctaatttttgtttgtttgtttgtttgtttatttttgagacagtctcgctttgttacccaggctgaagtacagtggcgtgatctcggctcaccgcaacctccacctctggggttcaagcaattctcatgcctcagcttcctgagtagctgggattacaggcacacactaccacgcccggctgatttttgtattttttttaatagagacggggttttttcctgttggccaggctggtcttgaactcctgcctcaggtgatccgtcctcctcagcctcccaaagtgctgagccactgcgctcggccagcgtaaatttcttctaaagatacattttagctattaaaaaaatctattttagctatagctacagcttttagctatcagtagctatagataaaaataactatattctaatatggcttaaatggagatatgaccctctcattgatattttcctatgtgtaattatttttgaagcattgtgagttctgtgaaattttgctatttattgaactatgaaagcacttgattttcttaactcttgagtgccagaaatttgggaagaatattcctgaggattagacaaataatgataccttgtgtatatacatggtgttggaatgtctacatttcccttaagggcatcaattccataagttggtctacagataacttcacattagttgaccattgtttaacaatgctttaaagttacatttgcataagaatccaacttgatttttctaggaaaagttaaggaaaagaaccgaagaacctgatcgtgatgagcgtctaaaaaaggagaagcaagaaagagaagaaagagaaaaagaacgggagagagaaagggaagaaagagaaaggaaaagacgaagggaagaggaagaaagagaaaaagaaagggctcgtgacagagaaagaagaaagagaagtcgttcacgaagtagacactcaagccgaacatcagacagaagatgcagcaggtctcgggaccacaaaaggtcacgaagtagagaaagaaggcggagcaggtatatataaaacaccctaagactgtccagctcataatgggtgtgcaataacaataataactactagtattattccttggaatggtacttgggaagctcttaagcatctttaagtgataggatgggttgcgagagcggaatcagtgaataaaatagttccatcttcggggcaacttctgtgccatttcccacctgtctaggaaatttcacccaacctttttacaaagttagagtacctgatggtctcttaagtgcttgtctcactgattccgagaaataaaatatgaaatcagccatactgttttaattataattacaaattgaagaagagtcttaaagagcacaacgataaccatcttagcactattggagatgaatttagaaagattttcaataatttttagttcttaagatttctaatgtaaatatgttttagagggtaagttttgcctagtcttgttaattaatagcatctactccaaggcctttacttattgtaatactggctgaagttgccttttggttttaaattattaagaagtagagatcgacgaagaagcagaagccatgatcgatcagaaagaaaacacagatctcgaagtcgggatcgaagaagatcaaaaagccgggatcgaaagtcatataagcacaggagcaaaagtcgggacagagaacaagatagaaaatccaaggagaaaggttagtttatatgagaattcagttcattaagaaacttttcacaccctaatcgccccactcacttttctccagacacaggcaaagatccatttcatacatactccttttcactttgaggaatgccattcagtaggagacaggcattctttccccctctcctacttagatttgtgaaaatgacagtttatctggtgttttcttagatgttaaaaacatctttcagttgataaacctgaaggtttttaatgtagcttcttttaagtgttatattacctttcggggttattaggtgtaggatttattatattaccttggttattggctccttttttttttacacactgcagtgtttcataatacgtcttataaagtgagtgtacattgttgcattaatcttcatttgtagcattcatttaagttagtaattaacatctaagtacctagaagttgaattgcttacatgtgtcttacccacgttttcaatgggatcaacatgctctttcccctttactttttcttttttctttttctttttttttttttttggtgtggcatcccagtagctgatttactgtgctgttggcactattaatggactttttaatttgtgtggcatgttttcacaagaatattctcatctaacttagcctttattggaagataattctgttaaccaccagggtctcctttctgagtttcatgttcttctattttgtattttttatataaaagatataaaatatcttttattttgtattgaatgagctgttgtgctttgcatggttttaggaatgagagaaggggcctatttctgattttctcagctctccttgtttcatttcattctacctgtctccatgtttaatcaccagcataatatatgtgctactattaaggtttattatactagtcttttgtgtgttgtttgtttattatatcctttaatagaactgtcctggttttttgttttcgtttttcctctagactcagctagaactagcagcacaaaccatggacatattttttggtctctgcttttattttcttaaaataagcacacactctttttctgaaatatttaacatctattggcttttactgtaatgtgagaaagtgttgaaaacttttgtcttcctgccagatgtgctagtgtttgccattcaagttgagaacttgcttctgattcaaaaggcagttgctacaaagggttaactgatttaacattagatttaagaatgttttacctaatctttttgcaagactttctgtgtaatgtctttttgggttgagaggtcaactcttaagagccaggtatgactgtcaggtcaaattaataatatttgttttgagaaagtttttagttttacatttcctattgttagctttagttgctctattctgtgttatcatttgtgccacttaaaattgttgggttggttcttagggataaaagctagctagccttcataactacttgaagtcaaagttgagtagtaaatgacactggcctgactaaaaacaggcatatttgtgtaatttctggatagagcaaaaagatgtccagagttgcttacctttaatcctaaaattgtaatgatgatgacatgaaatttagtgaaacttttttttttttccagacagggtctcagtgtcacccaggctgagtgcagtggcacgatcacagctcactgcagcctctacctccccggcccaggtgatcctcccacctcagcctcctgggtggctgggactgtaggtgcatactaccatgcttggctaattttttttttttttttgggggggtagagatggggttttgccatgttgtccagtgtgatctcgatctcctgggttcaagcaatcctcctgcctcagtctcctaaagtgctggggttataggtgtaagccaccatgcctggcccctagtaaaacttttcgttaagcggaataagctgagttacgtttagattagcaacagacagggattttccatgtgagacttggtgcaaagagagaagttactaagaaaactgtatcaggcttgtctcccatgattgggtatgctatgatagagttaaacattggaatctcttttagaagtgatataatttattggcattttgaaaatgctatgtaaaaataaattaattaaaatcagtgtgcagatgagtgaatttaaaaaatgtaaaaaaaaaaatacagaaaagaaactaccatgtagccatctaggcactcttataaatgactgaagatctggactttgggaccaggtgtgagccacagtgggcatttattaatggcaaatgagaaaaagcaagtttattactccaggtgctatgatagaagcagtttatcttactccacaaatgaaaagtggtttctcacacaaagctgtcagcaaccagtgtaaggtgctctctttgtcaagagagtttccttttttcatccatagccctaaaatccaccacaaattgtggatgtccttaggactattaagatctaccatatttacatagggcagaagataagattattggactgactactagtcctctacgggacaacaagacgactcttcctcattgaagctacctgtgcaccggagaagcccataaggcacaaagggaggactttcccacaaggtcagttagagcccactgtcctggcacagttctcacaagtggacagacagacatgaagcaagtcttgcgcttaactacttggacattgctttgtgtattatgcaagtgttacggactaaatatgctcttttacataagatcttcagttctctgagtgggtgcccctcccataccatgttttgtttttcattaccatctctttcctagatatttggtgttacgtcttcataactgtgcagaaactatgtagagggttctgtttctcttaaaatgtctttttgtctaattaactactctgccagaccagctattcttagtaaggggaaaagtaatttttccagaaagtttctagttggctttaacattttctgtagaaattttttgttgggggaatacttggaactgaaaaggctagactatgcttgctctggtgtactacttttacctctagtctgaggtcttacccatccaaagaatagtagaggaaaaagttgtttacctttttcattcttcatttgcagctgagttgaattttaatttctctttttggaaaaacaactctcagatggcatatatattacttttcttagcaaagcacaaaagttcagttgcttagattgggatttaagatccattttctttgattaggcttatccttcttggatattcaaatatatataaaaataatgttttgcattgaaaaatatgtagttgtagtttttaaaacatgcctgttataaacattcaactttttttcaccttttggggtctccatttttacccttctaacttaataattgaacctcatgtgaacatagttttgtatgctgtcttttatacctttcccagtgctttttgatgttttttacccacaatgaaatttacttaaatattatattctgcaatgtgcttaatagcttctcaccaattgagagaatttacccactattttaccttttgcttccttgaattccccttcctgccttctctctcatatattacaaattttatccctttggtaaattcaccaaaccgttgcttgcagtctgtgggaaatgattgtctctcatctctcagttgtttcactttttttcaaaatcatgtctttattgtattttactttaaaatccatggtcaatgtcttcttttatggcagaaaagaggggatctgatgataaaaaaagtagtgtgaagtccggtagtcgagaaaagcagagtgaagacacaaacactgaatcgaaggaaagtgatactaagaatgaggtcaatgggaccagtgaagacattaaatctgaaggtgacactcagtccaattaaaactgatctgataagacctcagatcagacagaggtaagtgtattgtttctcactttgattagggctttttgttactgtttgacagtgcagcgtaagtatgcacagatgaagatggaactaagccgagtaagaagacatacaaaagcctcttctgaaggaaaagacagtgtagtcctgcaaaacattttgaggtacattgttttgtctcagctattttgtagcagactcgtgcccccattagtgtgcctctttggaaattatcgcccacatttgtaatatagtcgccattgaaaagttaattatcctttttttagggattttgatgtcatttcttttttttttttaataaaaaggttgaactgtttttttttttctttttggtattaagtccatcttgtgttggtacattggcagagacatatgctttaaaaacttaaatatttcggaggcacatgttggactactttgttttaattaaactgctagtatttctttgtcaaggatgtttctagttttttgctttattgccttgcattctaatgcagtttgttctgtaactcgagagccagtagcattggattgatggaagtgtagggtttatgaattattgcagctgactaccatacctcacacagcgttggtgttgtgagcggcccatgaaaagccaaattaaaaatcaaggattcagtcaaactaagcaggtactcatgccaggtactcctttctctacccacatccatgtttgaatgctattgcctgtgatctttacgcttaactgttgtgtatcttttttgttctttacaagaagtgcagaggggttttttgtgtattgcgtgaaaacttataaaacaaatgttaacagaatggaattttttttcaactgtatgtagggctgcagtggtggccagaattagatatctttaaagaattttaaatacaataaacacttcatattattcgccttgttacactcaatgcaattctcaagtctataagaggtatgtgcttaatatttcctactgtgtaggagaatttgcagtcagccataggtatgtaggaatagtcactcactggctgatacatttaaagcagcagtgtgaatagcaaggacagacaccttcaatttgtgaaatcaaagaactgatgcactatatagaacgaatttgggtttttaaagaaatattaaaagttaggtactgtaagtgttcttaaaacctgtaaacttcattctgtgggctagtggtgtgggacaaaatattcctaatgaaaggaagtaccaattagttgatttgttggtggcattccccttttgggaaagcaatgtaaggttatgtctgtgtatgtcattcacacttaggcaagcatacacaggcacatggctttaagaaccacactgatgccttgataattaaaaagaatacaagcattccatgtacacatgttaattagcagttagtgactgggccaacactttctcataaaaattggccttttacatgttgtctaattatcatttttccccaaattttgcgttgtaggactactgttcgaagatttttggaagaatactgagaacggcataaagtgaagatcgacatttaaaaaatgaggtgaaagaaagctatagtggcatagaaaaagtataaagctcagttagtttttttattattattattattaaaagttaattcaggactgatgtgacctaccagatttcagaacatgtgttaatagtatatatgccactgaaaacttaggtcctgtatcatacttttttctttaagactttttaagaaatattacttaaacatgtggcttgctcagtgtttaattgcaagttttcaatcttggactttgaaaacaggattaaacgttagtattcgtgtgaatcagactaagtgggatttcatttttacaactctgctctacttagcctttggatttagaagtaaaaataaagtatctctgactttctgttacaaagttgattgtctctgtcattgaaaagttttagtattaatctttttctaataaagttattgactctgaactagtcccctgttttaaatacaagagttacactattactagaggtgttggtgtacagttttatctgatttgttctgtttaagactaatttttatagactttctaatgttttaaataatggtgcttcaattttaggtggttatgaataaatttgaattttgcttttaatagcaaagatgtgcagtgaactagaatatatttttacatccctgagagattcatttagtagaaaattccaagtatcctgacaagcactctttagctggctagctatgggatgatgtagaaaagcattcaagagctagtttttgttaagtcctgtatcaagattaacccagctgtgtcagtttataaatgtatttgtgtatagggtgtgtagtatatatggcaagggttttttccccccacttaagtgattatttttgtgtcacatctaggaaaaccggcagcatgtttctatctatagccagcttcttcgactgtataaaagtattctctccagctacgtatatacacacatacatatatatcatagcaattccttgtggtttataacttgcaaatactgctatcagtttataggtaaagaaacagtgtgttaaatgacttatccagggagggtcctgtggcttcatgtttatggagttgctaggtctctgcctcatggtccagtgcctgttaagccactgtgttcattctaataggcataatgaattgttaaagaatttactaaaatctcttccaccaaactttgaaaaataatgaagccgcccccactttagaggctctgtatgaaaaaatgctgtggagacagagccctcctggctccctagctgatcctggagatgcagcaatagatgaatgggttatctctgaatttgtaagagataattcacatgaggattaagataaaatgggaagtaaaatctaacaaacacaaagatagctcccaggcactgctttgtgtagtttgacagcattgtggttgtagcagcaaaggacttaaagtgatagtttttaaaccatattctgtccctaagtaataaaaaatctaggaagttactaaaataccagatttgttctgctctgcctcatctagaatcaacgtctaactaacttaaatgaagtataataaatgagttcatatgaaaaggcttcctctatggacacttagatatattgtaactattgaagttacctgggatgtgggggtggtgggaggaggacctgcctccccaggacatctatgactaaggcctggctttagttatggagagagacgtagaagttgaattttacacccaaaattgatgtgactgaagaggaactgattgttgctaaccagctcacaagaatccagtattgagaccagttcactagaagaaacaaacatttctgccatgcagaccaaaaagttattagttggtgaatatgtattttctctttggaaggtctttaaggggagcaaaccagttttaatcaatcagattgcttggtaagtttggaatctgcaatcagttggtcttaaaaaaaaaaaaactttattttggaaatttaaagacatacacaaaagaggaacaatataattaacctctgttaactcatcaccaacaagactcatgaccacttttatacttcatgagtgattgtatttgtatccactgttttctattattttcgagcaagtctcagacacaccatttaatctgtaaataattcagcatgtatctctaaaagacaaagacctcttaaataacagttcattagtataaaacaaattgggtaaacttttgttggtcatcaaactatattagcactggtccaatagtttaattttcattgagcctttcaagaggaccgaccagtctgctgctcaagacatcctctcctctgga

SEQ ID NO: 382 - DNA, 1466 bp, Homo sapiens
attctgtgggatgggacttcatgcaggattggttttcaagtttgatttcctgagggattttttagttgtttgtgaaagaaccccaggtctacttttgaaattttgtattataattgtaatgttgcccatggttaaaaaaaaaaagtgttcagtgatctatgtctcctactactcctatttctctgtttttcctctgcaggagcttgctgctgttaacagttattcttccaagttgttttctttgtggggagatgggaggtgggaggaaatataaacatatatgtatagatctttcaaaatatatgacggtatacccgtatgttctgagtcttgctgtttttacctggtaatatttagaaacatttattttgagataaaggagagcacttttaagttgaacctgtagttttaaaaagtacatttcaagtaagccaaagcagagaagtaaatgtatttttcattgttgtatcagaattttgaatttactattttaaaaattcaagagttttgtagctgatctatttcttcccctcagccatcccaaataggtcatttgtcaacagatttaagaatgtttagaaacaacaactttgggaaacgggaaacaatttggtataagtgggtgtgccataacctctctcgtagccattcattcccggatacataccctagagaaactcttacacatgcgtaccaggggatggatttaagcatttgtgtgtaataggaagaaaagaagaaaaaacccgggaagatcccaagtgtccaccaacagtgtgttggataaatactgtggtatattccaacagtggaattccacagaagtgaaactgaactgcagctgtgtatgtgaacatggacaaaactcaacaatagaaggatcaaaaaaagcaagtcacagaagaatacatcactatggttccatttcaatgaaagtcaaaaacaggctgtcaaatacatgataaaaggaaacgattaagacaaaatttaatgttagccgttttgatggagggagaggtgatcatgagggcacaggggtcttcagaagaactggtgagggtctgtttctgaagcctgtgggcatttccttttttaatctgtatgtttatgtgcttttgtatgtatgatatttcttaataaaatttaaaaagaagaatgggaaaaaagtcttggtgtaggtagttactaatatataagctgtagtgtatttcgtaaaattaaccatcagtcagtgacaaatttaaagatgctgtttcttgagtgcccaatttaaggttttattttgtttgagacagggtctctgtcttgtcacccaggctggagtgcagtggcacgagctcagctcactgcatctttcgcctcctgggttcaagccattctcgtgcctcagcctcccaagtagctgggattacagcttcgcaccaccacacctggctcatttttttgtatttttagtagagtgtttc

SEQ ID NO: 383 - DNA, 11343 bp, Homo sapiens
gccggccgcggcccgcgggggcgacgcagcagcccgctgtccccgcgccgccggcgggggagctgatccagccgtcggtgagcgagctgtcccgggccgtgcggaccaacatcctgtgcaccgtgcgcggctgcggcaagatcctgcccaacagccccgcgctcaacatgcacctagtcaagagccaccgcctgcaggtgagcccgacgcggccggcggcccggggggccgggcctggctccaacaaagcgcccggcgccggcgcgcgaagccggcctcggggggacgagcgccctgcgcgctgccgctgccgctgccccaccggcctctgccctccccggccggaggcggctctcgaaccctcgcggcaggcgccgcaggtgcggcctctgggggggaggaggagctgggagccccgggtccgccgtacgcgccagttccctggttccctggctccctggccccgagtgtcgtgccggacgccggcccaggctttttacacttttttgcctgtgagttcttaacggcgttttggcgagggacgcatcgtctccattatattaatgagaaacagattatgcaacctagatgatgcggggctttaaaccggggcctctggttctgaagccctgtgcttgccacgacacccacaatgccgcccttgggtcctgcccagtggactgtatgtgccacaataactagaagagagggttttaaatgttctcaccaccaagagacaatacgtttgaggtcgaggacatgttaaacactctgacttgatcactatgcaatgtatatgtccatccatgctgcacaccgcaccccatcagtaggaataattactgtgtgtcgattatgaataaaaaaatgttttaaaggagcggtaggtttgcctctaaacaccatcagtcagtttcacggtgttggtaagatcagctcaggactgagacctaagggaaattgcccctgtggctcttctttaagagggggacacagtaaatacaccatgacaatagtctcaacaaccctccacgttatgcaaaacagggcagtcattttcaaccttgggacacatctgtgacgagcttattaaaaatccagatgtccagccccaccccggacctgttaagtcacaatctctcagtcattacaatggcaagtttccttccaccactctaggccagcagtgacataattcaaaagcgcaagtcattgaaagcagttctgcgaatatgtagcttttgatgatcaggagtaaatttagagtacccagaatattgcatgttctgtctgcccatagtcaggcttctgataagaatttcacagcagaaaactctgaggttgtagtctctagtaggacagatgtgtcgccaatgaagagtgatctgctcttaccaccatctaaaccgggatgcaacaacgttctcaattgaagatcagggagccagtcaggaaatgtacctgaggtatgctgaggaagaccgtgcaggtggggccgaattgttggactgaaaagctctgggtttctttcagcactcaagtgtaactctgggaatggctttcaacctgttgttttgttttcatactaaattttaactaaatcctttttttccctattgtttttgtgtttttttgtttgtttttgagacagagtctcactccatcacccaggctggagcgcagtggcgccatctcagctcactgtaacctctgcctccggggttcaagcagttctcctgcctcagcctccctagtagctgggattacaggcacctgccaccacaccctgctaatttttttttgtatttttagtaaagacaggttgcaccatgatggccagcttggtctcgaactcctgaccctcaggtgatccacccacctcagcctcttaaagtgctgggattccaggtgtgagccaccgcgaccgacctaaatcctttatttaatcataacttaggtggatgaactatttcttaatagtttctgttgttcctttctgtggagttgttgttaggagctctagctctttaaagaccctggtaaacatctgttgaacataaagataccatttgcctttcaggactggttagtatacagtaggtttgtttctaattatgttgggttttttttgttttgtttgagacagagtctcactctgtcgcccaggctggagtgcagtggcgccatcttggatcactgcaacctctgcctcccaggttcaagcgagtctcctgcctcagcctccctagtagctgggattacaggtgcataccaccacgcccagctaatttttgtatttttagtagaggtggggtttcaccatgttggccaggctggtctcgaactcctgacctcaagtgatccacccgcctcagcctcctaaagggctgggattacaggtgtgagccactgtgcccagccagggcaaacttttttttagcaggaattatacctcaccagatccatcatttttttcttgacaagcagactgactttcctgtcttgtcctggctttctaaccgcagtgccccgtggcccctgagcagctcctgtcttggtgtcttcctttaatgaaggttgtctgtgtgatgcaatagccatctatatgatggtgcccagtatggagatctgtaccctgtctggttactacatagaaggcttttcagggtcttgctctgttaacccaggttgctgtcaggctcttgagctcaagtgatcctcctgctttagcctccccagtagctgagactataggctcctgccaccatgccctgcctcaaacattgttctttttgtttgtttgtttgagacagtctcactctgtcgcccagactggagtgcagtggcatgatctcggctcactgcaacttccgcttctcgggttcaagcagttctcttgcctcagcctcccgagtagttgggactacaggcatgctccaccacgcccgactaatttttgttttattagtagaaacagggtttcgccatgttggtcgggctggtcttgaactcctgacctcaagtgatccgcccgcttcagcctcccaaagtactgggattacaagagtgagccactgcgccaggcctcaaacatcaatgttgatacctgttttcaaagtactggaagaaggtaggggtaaggacaaggaaccgggaggaaggctggctgggaagctatcttaggttttaagagctgtgttgaccagagactccatccactttctgccctgagtatcttattggcaggttttcttatagtcagtggaaattttcggtcttagttacagctgcttgcataatttctttcattgtttatatattttctagattatattttcttcccctccccactagttgctgttggttcttattttattctaatctttcttcccaaaacaccccacccccaaccaaatcttcccttcttaacataaatgatgagcaacgaggatgggtgagaatgaggaattggattgcaaactgtagagtatgtgccgccttctggtttgatgtgggtgcctaaggtatatggccatattccatatcctgtaaggaaatccagaaatctagcccagccttgtgtatggtgggattcatggagaaatgaaagccatgaggattcaggggcaggaagagcagaagtaaatgtacatttttttattcctagagattcttttgttccttgtgtgtgaaagcagtggaggggacaggcaggcacttaaagaacctcttatcaagcaacatttatattgtaaaacatggcttagaggattttgtgttatttttagtccagaggtttgtttttaatgatttgccagaaattttttaaggaaaggaaaggttccaagttactctatagactatactgtacaaagatttctaattttaaatttagaataagatgacaaagcaaaccgtttccttcttggatgctttctcggaaggcagtcaggtggtgctagagtagctagacagacagtttttcctagtttttgctacagttcttacaatcgtttcttttcaccctctactcttcaactgtgtcttacttttcctcttgtatattttctttctgtcttgttactggattgtttcctctcataggttctcttttcagttatgcgcacaaaagatacagtacaaaaagtccagtgcattttattcttgaaagtatatagaacttcagaatgaaaacaccactttctcactgcacttccattttatcgtgccattgccatttctcatctgagccatcctacccttgagcttattctctgaggacagaaatgggaagaaggccccagaagcagtgggtgggggtgggaggaggctgctgtgctggtgagtggtggggtgttggctctcagaaaacaggagcatggacagtgtcagcttgttgccatgacagtgaggttattaacatccacttagactgtcttcagtggtctcttacccaggcatgatagttttggcttagatggctacctgaagagattcagtataatgctaccagtttttattgaacatttattctgttcaaaacattcccaaaggcaacagaagatacaaataaatctctgcccatgaaaaggtgtggggggcattagaaggcgttctcttcggtgtaatgaagtaatgagagaagaaaaagtagtttgaagctatggagtaagggactttgagtatcccaggctcaaaaagttgggacttgaacagtacgggggtgctgctgaaaacgtttgagggaggtaatgacatgatcgaagctatacttgagaaaggtgaatctgataaagtatgagtgaaaaagagactgaaggtctagaaattagattgaggctaatgacaaaatccacataaataggaggacttgaacgaaggggcacttagaagaggacaggagatagtaaaaggcattcaatgatgagagcacacactacaggggagcatgagggaggttggaaaagataatgaaaggattaccgagcttcactgacgatgtgtttgaaatgagcaggaatcttgtagtgatcctaatccgtggttttctggagcatttcacagcctaggaacatacaaggggggcatctccctggaatgtaaattgactaagaggaattcaataatggtcaaatgaatgcagaattttagagtcttgcttagtattctcaccacatttcgtttagtctactcatactctttttctcttactgctgacactagatggaaaaactcttaattaaaagtatttcacaaaatgtgctcgttttcagtcattccgtttccactccagcctgttgtgttgtttttttgaaataataatttaaagtaattttccttttgcaggatggcatagtcaatccaacaataagaaaagatttgaaaactggaccgaaattctactgctgtccaattgaaggctgccccagaggccctgagagaccgttttctcagttttctctcgtaaaacaggtactctctactctgaggatgagatacagatgctaaaaacctattgtgcattctgattacttagcagacataactacagaattgagtagacagctgcttgtgaggggagatgcctgcgtgtctcccagttggtataaacctgagtatgctgttacacaagtggagggaaaagcggcacggtctggagggaatatgtctagaagtgagttaaaatacagagagagagagtaaaccagttcagcaaagaatgagaaaatgtttgctcgcagatctcctgtgtgagtctgcatacctccaagggcccagcgcaaaggcacaaaggaactgttctcccaggggaataagaacctgcagaatccaggaaaagaagagttttggaagccgcaatcttaagaggagggagggccccagtgactgggacaagaggtgattcagaactggaagagattggcatctgaaatgttcccctgagggtctgctggagggcgtcctgagaagagcattgtaaagacatttttttcctgcctgcagcacttacagatcagagtgtaaatgctggagaccatagatgtttccaaaacaatctcctcacttttcacaaagcaaaagcaacaagaagaggcatatatataattaactgcgatgttcctgcttttacattcttttgacttggactgctgtattttatgttatttatattaatagtgtaaaatcattattaatttgggtgtatgatggtttctgaaatgttttgaccagttgctgtttttcaccttagtcccttctgcgttcctcctagcactttatgaaaatgcatgctgagaagaagcacaaatgtagtaagtgcagcaattcgtacggtacagaatgggacctgaaaagacatgcagaggactgtggcaagaccttccggtgcacatgcggctgtccctacgccagtagaacagcactgcagtctcacatctaccgaactgggcacgagatacctgcagaacacaggtgaagggaaagaaatgatggcacagaagtcagtagctatgggaagcatttcagatgaaacatcctggagagccagtggtgtggggaggaaaaaggaatcttagaaaatgtgtgacgtggaagaaggaagcttttgaaaatggaagcaggtcttgcaaatgacacatgtctgggcctgaaatcttgacccaattgttccccctatttttttctgccagccctctttgagagtcccttgttatttccatttgaaaatctcagcttccagaattttctatcagagggaaccaaactgccaacaaataagttttatcatgaaactgtacttcatttaaaggtcaaattttcatttagtgtgatagcttcctgccttagaaatgataaaacttgcattatgtaagtcttttagcttcttttggcttaaagatctgagttgagttctagtacttagagcttaacaaaaggtatgtttcctccttctctgtttgcatgtttctcaaagttcacctgctataataggaccaactcccagagttgcgaaagaatggatttatcttgtctgggttgaacatgacctctgctatagatgggggaaatggcatttgtaagtgaggatagagtgtcatggtcgaagaaagttgtattttaaggttttctttttgctctgtcattgttttcagggacccacctagtaagaaaaggaaaatggaaaactgtgcacaaaaccagaagttatccaacaagaccattgaatcattgaacaaccaaccaatccctagaccagacactcaagaactagaagcttcagaaataaagctagaaccatcttttgaagactcttgtggctctaacactgacaagcagactcttacaacaccaccgagatatcctcagaagttgcttttaccaaagcccaaagtggctttggttaaactacccgtgatgcagttttctgtcatgcctgtctttgtgcctacagccgactcctcagcccagcctgtggtgttaggtgttgatcagggctctgccacaggggctgtgcacttaatgcccttgtcagtaggaaccctgatcctcggcctagattcagaggcttgctctcttaaggagagcctacctcttttcaaaattgctaatcctattgctggtgagccaataagtactggtgttcaagtgaactttggtaaaagtccatctaatcctttacaagaactagggaacacgtgtcaaaagaatagcatttcttcaatcaacgtgcagacagatctgtcttatgcctcacaaaactttataccttctgcacagtgggccactgctgattcctctgtgtcgtcttgttctcaaactgatttgtcgtttgattctcaagtgtctcttcccattagtgttcacactcagacatttttgcccagctctaaggtaacttcatctatagctgctcagactgatgcatttatggacacctgtttccagtcaggtggggtctccagagaaactcaaaccagtgggatagaaagtccaacggatgaccatgtacagatggaccaagctggaatgtgcggagacatttttgagagtgttcattcatcatataatgttgctacaggtaacattataagcaacagtttagtagcagagacagtaactcatagtttgttacctcagaatgagcctaagactttaaatcaagatattgagaaatctgcaccaattataaatttcagtgcacagaatagtatgcttccttcacagaacatgacagataatcagacccaaaccatagatttattaagtgatttggaaaacatcttgtcaagtaatctgcctgcccagacattggatcatcgtagtcttttgtctgacacaaatcctggacctgacacccagctcccatctggcccagcccagaaccccggaatcgattttgatatcgaagagttcttttcggcctcaaatatccagactcaaactgaagagagtgaacttagcaccatgaccaccgagccagtcttggagtcactggacatagagactcaaacggacttcttactcgcagatacctctgctcagtcctatgggtgtaggggaaattctaacttcttaggccttgagatgtttgacacacagacacagacagacttaaactttttcttagacagtagccctcatctgcctctgggaagtattctgaaacactccagcttttccgtgagtactgattcatctgacacagagacccaaactgaaggagtctccactgctaaaaatatacctgctctagaaagcaaagttcagttgaacagtacagaaacacagaccatgagttctgggtttgaaaccctggggagcttgttcttcaccagcaacgaaactcagacagcaatggatgactttcttctggctgatctggcctggaacacgatggagtctcagttcagctctgtagaaacccagacttctgcggaaccacacacagtctccaacttctaaaactaacggtggagtccatgtgtgaaatggcatctaccatttcctctggattaaaactacggactggggacaacagtattaattcgattgaatgtggctgatgatgcagttgcttagcttctttgtgtttctttgccttttgtacttgtaaacagaaatttgcgtataaatgtgagtgtattataaagtttgagatgttgatctaaattgtttttgtgttgcctacatttgccttttcacagctagtcttttcatgttaaaaaaaaaatgtatttcatatctataaaacctatatagccatttagctgaagcccagcttaccaggttcaagggtacaaacttctcaaatcttcaaaacattttagtcaaagtgtaatatacttaaactgcacctaaaatatctttggcactgcttgttagaaattcctgattcctgttactaatcactaaagaaaccggatgctgccaccgtaggatttaagcagtagtgcttccatgctcttaagactcctgctgcctggaccttcgtcagctttgacacctcttttctgatttaaagacaccaaggaaaactacaactgtctttagctttgaagcagttttcatgtaatcattgccacctcttcgctacatgaactactattgataccagcatacaagtgtatagcactttacacacaagaggtttattgatgtaaaattatcggctagggaagcagcagcgggccaggtgtggtggcttacccctgtaatcccagcactttgggaggccaaagcaggacgatcacttgagcccaggagttcaacaccagcttgggcaacataagaagaccgtgtctctggaatttttttttttttttaattagccaggcacagtggcatgcgcctgtgatcccagctacttggaaggctgaggtgagaggatcactcgaggagattggggctgccatgagccatggtcttggcactgtactccaacctgggtaacagggcaagaccctatctcaaaaaaaaaaaaaagtcgccagcaacaagcacgtagtgtagtgttcctgctaaatgagcataggttatccaaaccttgggaacagggagttatggaaacgtgcctatgacttcatcttggggtgtgtcctatgaagatcctttctggtctccacagtaggccagagttgggggctctggagctgtttccccaagtgcatccacaagctggatctgagttttgtcactctaaaattaaacaagaaaaaaagtgggaaaagggcatcccccattaggtttcaatactttgcacttctactaagcttgatagggcaggagtgcaatctacaattattttaaagtgaatttccttccattcaccattctttatcttttctttgaataagaaaaagtatctagcaaggatattacttgtgccttgaggctagcaattataggatagattcatctaaaatatggtattctgcattttggttttttttcttaagtgaataataccagtcttcaaagaaaacaaggtgaagacctattgcttcaataatcaagaatgctttgtgtgttttgaggtaggagcatgatcaagtatgctttggggattttctgtatttaggagatcctggattcttaattgttggctaagttccagtcaagtaggaatcagtgcagcctgtaagttctccacattgacacacacacacacacacacacacacacacacgacatgctcctttctgtggcacatgcctgtattactgaaagctaaatcctcaaaacctagtaaggggaccaatgattcattaaagtaaattgatggttttgctactaattcctatcccatacatttgacacaaaagaagtgttggtaatggataaataacatatcccgggcagatgagctcaacctagtaggtaagagtttggtttggtcacagttgcctatgagtgtgggtttcaaaagaaacataaagccttaacttagaatttcattatgttttagaatcatcactgccttaatattcaagcatctatttaagtcctaataaaggagaaatgcatgtttatggcttttttgtaaatataaatgcagtgatctatggcttaaaaaatttgtttctgtgacaatgtttgtaaatctagccaatagagtcatttacagaagaaaaatgagcatgtaataatacaagaactgtttccccctcaaaacctgaacctgaattatttgtaaaaactgaaatttaatgattaaagagaagccagaattgtacccttttttgtgaattcttgaacgtactcataaatatgacttattgtattgccttaagttttcactcattgtcttttgaaagccatatgataaaatgattttatttaataata

SEQ ID NO: 384 - DNA, 970 bp, Homo sapiens
ttactgattctggagatggaggaagggtccgcaagccaaggaatgtaggcaacctctagaagctgggaaaggcaagtgaacagattctcccctggagccttgggaaggaatacagccctgctgacaccttgatcttagcccagcagtctcatttcttttgacctccagagctggaagataataaatgtgtgttaaggcagtaagtttgtggtaatttattaatagcaagagaaaacgaatatagctgctagtatgtaaaaggtggaaattttcacataaaactctagccataccaaagatgagtagcagctgcccccttttaataaaggatgtgtttccaatttcactgcagtcctcacccctcccttttgtctaccccagcctcctatgtccatttacatgaactacccagtctaagtattaagttttgtaatcgtatactgaactgcagtgtctcccaaacagtaatcctaatttcagcagctaaaatagaagcaagcaaatccagccttcttaaaatgattaaccctatcaataataacaatcttttcatttgtatagtgtggtctaggtcaagttacttaatttatataagcctaaatgtccttctctgcacaaggtggggcaagttacagtacatacccgctacagtcgttttgaagacaaaatgagacacagcatgaaaagtgcatccaccagacccacctggtacccagtaaggcctaggtaataaacaacggcggaaatcagtgtacttctgcctcacctgccactagacatttgggttgtttctaatctttgggaagtaaacgcattgctcaacgtattgctttttcttttatgtgactactgcctgaagtcactttcctaggaagaatggatcgattagagaggcggggcaataccttttacctgctggcaggtgaaatttcgcctcctggcggcgtcacctaaagtcctctccctccaa
